United States Patent Application Publication US 2021/0254182 A1 - sequence listing, part 5

SEQ ID NO: 92 - DNA, 6830280 bp, Phytopthora sojae (residues 1-1,707,570 of 6,830,280)
  misc_feature (116850)..(116949): n is a, c, g, or t
  misc_feature (449913)..(450012): n is a, c, g, or t
  misc_feature (684235)..(684398): n is a, c, g, or t
  misc_feature (689322)..(692253): n is a, c, g, or t
  misc_feature (695709)..(695808): n is a, c, g, or t
  misc_feature (704383)..(767052): n is a, c, g, or t
  misc_feature (1090814)..(1100813): n is a, c, g, or t
  misc_feature (1526343)..(1526442): n is a, c, g, or t
  misc_feature (1531123)..(1531743): n is a, c, g, or t
  misc_feature (1538912)..(1547265): n is a, c, g, or t
  misc_feature (1558805)..(1569699): n is a, c, g, or t
  misc_feature (1846672)..(1846771): n is a, c, g, or t
  misc_feature (2060558)..(2064921): n is a, c, g, or t
  misc_feature (2067168)..(2105998): n is a, c, g, or t
  misc_feature (2120976)..(2144287): n is a, c, g, or t
  misc_feature (2152081)..(2153418): n is a, c, g, or t
  misc_feature (2166625)..(2166724): n is a, c, g, or t
  misc_feature (2169618)..(2181259): n is a, c, g, or t
  misc_feature (2189220)..(2189319): n is a, c, g, or t
  misc_feature (2195851)..(2196581): n is a, c, g, or t
  misc_feature (2198717)..(2209061): n is a, c, g, or t
  misc_feature (2211746)..(2249613): n is a, c, g, or t
  misc_feature (2253993)..(2259139): n is a, c, g, or t
  misc_feature (2286108)..(2286207): n is a, c, g, or t
  misc_feature (2293004)..(2293004): n is a, c, g, or t
  misc_feature (2294764)..(2297229): n is a, c, g, or t
  misc_feature (3010972)..(3011071): n is a, c, g, or t
  misc_feature (3016492)..(3016682): n is a, c, g, or t
  misc_feature (3021422)..(3021885): n is a, c, g, or t
  misc_feature (3198681)..(3198780): n is a, c, g, or t
  misc_feature (3358360)..(3364844): n is a, c, g, or t
  misc_feature (3368464)..(3379166): n is a, c, g, or t
  misc_feature (3391216)..(3391315): n is a, c, g, or t
  misc_feature (5160212)..(5160311): n is a, c, g, or t
  misc_feature (5601576)..(5601675): n is a, c, g, or t
  misc_feature (5606896)..(5617696): n is a, c, g, or t
  misc_feature (5623782)..(5642643): n is a, c, g, or t
  misc_feature (5652685)..(5652798): n is a, c, g, or t
  misc_feature (5661179)..(5662574): n is a, c, g, or t
  misc_feature (5897897)..(5897996): n is a, c, g, or t
  misc_feature (6065830)..(6065929): n is a, c, g, or t
  misc_feature (6093671)..(6096991): n is a, c, g, or t
  misc_feature (6116449)..(6117808): n is a, c, g, or t
  misc_feature (6137192)..(6148306): n is a, c, g, or t
  misc_feature (6160785)..(6161254): n is a, c, g, or t
  misc_feature (6186004)..(6186103): n is a, c, g, or t
  misc_feature (6191492)..(6192578): n is a, c, g, or t
  misc_feature (6236919)..(6242523): n is a, c, g, or t
  misc_feature (6247395)..(6257394): n is a, c, g, or t
  misc_feature (6258996)..(6265732): n is a, c, g, or t
  misc_feature (6267174)..(6267508): n is a, c, g, or t
  misc_feature (6272215)..(6366464): n is a, c, g, or t
  misc_feature (6367167)..(6367492): n is a, c, g, or t
  misc_feature (6371823)..(6372269): n is a, c, g, or t
  misc_feature (6380696)..(6380953): n is a, c, g, or t
  misc_feature (6386254)..(6390992): n is a, c, g, or t
  misc_feature (6391939)..(6393915): n is a, c, g, or t
  misc_feature (6657526)..(6657625): n is a, c, g, or t
ccctaaaccctaaaccctaaaccctaaaccctaaaccctaaaccctaaaccctaaaccctaaaccctaaaccctaaaccctaaaccctaaaccctaaaccctaaaccctaaaccctaaaccctaaccctaaaaccctaaaccctaaaccctaaaccctaaaccctaaaccctaaaccctaaaccctaaaccctaaaccctaaaccctaaaccctaaaccctaaaccctaaaccctaaaccctaaaccctaaaccctaaaccctaaaccctaaaccctaaaccctaaacccttaacttcaccatctcatttacaaaaaccacatttacttccaccttcaagaactccattcaaccaccacataactcctctccatcctacaacccaccactttcccacagcatccactcctatttcctaacctcatcatctatttttcacctcatatccaccattcaactacatctctaccactccccacacaccgtttctgcacaccatacttacttacccatccactacatccatccaatccctaacctccttctttccatcctacaacccaccacttttcgctaccatgtccactatcatttcccaacctcattatccatttttcaccttacatctactattcatccacctctacccaagttaccacacacaattcatacatcccacacctaattcaatcatttactgacttcatttaactaccgccacctttcgcttcatcatactaccacttttatctacgacccttactctcatttctttacctcgttattcacatttcaccttatatccacaatttaaccaaatctatctacctttcaccttatttccgctactcaacaacagctatccttttttatatccgtttttaccaccatctacattccctactgcactatacacttccaaccaaatacatctattctacttcatacacatctttttttttacattttcacacacacacatgtccataaccatacctacttctacacccattacctcaatttaacctccacctttctctctttcgttttaatttgtcaacccgccttttgtaccacctctgctctcatattttccaacctcgtttacgcattttttacctcatatccaccattcaaacatcgcaaacctactttccacacaccattcgcgcacctcatatctaattccacatcaagtacctcaaattaaccacgaactcgttctcttcatgctacaacacactttcttctaccatccctacactcctttttcaacctcactatccacttgtcatatctgttccaccccatctatccaaccagctccttccttttccctatccttcaatcatttattgactaaaaggtagataatttcgtttgttaccactgctacctatcaacttatacttacactatgaatactatcacatattcttcatgtactactatgttcacctctcctcatattctactacacttgtattctatacggataaactgacgacttccaaagcgtaaccttcgtatgcccaaaactagcagctatcaaataatggataactgacccgactctggcacatgtcagtggtatcattggattccccgtatacaaaatcatatacgtgtggagtagcgccctcgcagaaatctcgcgaatgcgatttcgcacaaactcggcgcgtctggatagcggtcgggccgagcgaattattcccggttgttggagtagcgtatcttcgaaatacaggcccaagtcttcacaggcttcagagttggggggttcttgtgttgacgcttgttccttgtcgtagggcgtcgagcctcgggcgtgcagcgttatcgggtcggcgtttcctcggcgttcccgtcgggcgtgcggcgttatcaggccggcgtttcctggggcttgtgtggcgttatcgggcctacacaggggggtcttgtgcacggcggttatcaggccagtgcggtccttcgcctaggcagcgcgttatcgggcgcccacctaaacggtatacgtttaacgtgcctttgttccagcacgggtctgtggggggtgagcacccgaaccagcaaacgacgggggggcgcgatatcgaggcggctctacttgccggcatcctctggaacctcggagaagacgggaggtctttgtggttcagagaaatttcgggactgagtccttaccctgtcctatgtccttgctactggctattccctactactgcttgctaagcctaccgttctgggcctatccctacttctgtcatgcttgcactgccgtccttcaatctggtttgcgtggcgtaatcaagatcttacctcggcgtgttttgctcggcggggtttagggtcggcgcgttttgcagagacggggcgctggtcgtgtatcacggcccatcatccgcgtcgacttttcccgtcgatctctaccgcgcgtcgccccccatcaatcgcgtcgcgttcaaccaactgcatcgcgctccatcctccgtgccgacttccatccttcgcgtcagtcggcttccatctcggcgcctccactcaccggcgtcgacgtgcccgcttcctcgcggggcactacaccacatacgcccaggttttcacgtcttcgtactcaaaattggctccgatcttattttttatttatttgtcccgtctctgacacttgggagcagtacaactgaattccccatatacgaaaacctatatgtccagatttttaggttccgaagccgtaaactagagcggttaaaaatccctggtacaccgacttctttgaatttatatttattatcatagcttatttattaagtgttcgagtttataaattatttgaaaaaagtcgccgattttacatccatttagtaacatgtcactaattcgaggtacccaaacttattctatggtttacgtaaattaagctaaattggggcgcaaaggaccctggatgaatgattcttagacggaaattgtcggacaattggcagacagagcaaatcgtgatttgtttagagaatcttacggtaatgtggttgtggtgtgtacttgaacagcacgaagagagcatggggagacttgccaatgcgtgtatcgtaagctggcttgatatctatttgaaaaggcggaactcacactaatctaaattgttttgtggtttttccgcatcagtttggctacggtggcccagctcaactggccgcaccgacgttttcgcgagtgtgcggtttctcggtccactgcaacgctctcagcacagtcgaggtatacttgcgctcgatgtgcgtcatcaggtacctaagctcgctcagtcgcttttgaagcttgcggtctggcatatcacgtccgtcgagcaagcgcagcggcggctcttgcttggacttattgccgcatctccacagcacccagatgtgatgaacagagcagtcaggtatctcgaaatcttcggctacgcgacaaaacttcccaccccaaaaatgcgcaggcgtgcgctcgaagtcgttatcgagctgctctgtgaggtgctctggaggtgctgccagcttctgcagaagctcgtcaacggcgcaatctttaacacacgccgttatagcttcattgagcccatcgtaggttacagttcccgcaccaatcgctcgttttcaagctcagcaataatatccttcgctgtatccacccgtgtcgcttcaattttggtgagggcaccgaccaagttttccatcagccacttcatctcgcacaaaatggacacgtgtggcggcacgccagttgaacaaatgcgagcttcggagctcccgtcacctgactgcactcgctcggcaagagatgacagcagggctggatcttgaaatagtggcgtttcgagaacgggatgcttcggtgatattgcacgtaccaagtatgcgtgatggtaagtcagcgaggctaagcaatactcagcgattaactttaacccttcgggtagtccagggaacataaagcggacaccttgctgaacaccttcgtcatccacattgaagtggggcggaagtgttgagaacttgtagctttccgtaggcagcccagccactgcccgaccaacgtgcatttcacccgcagcttcgtagcgtagataggtgttttggacgccgccaagcgaccaaccagctctcaaatgcaccgcggtcgacgacggtcatgccgtcgagcccgaagagcaaaatgtagcggaacctctccgcattgagtgcgtacccagctctctaggattaagcccttggcgctttaattcggcgacaataccttcctcagctagcaaacgctaaaagcacttccgaaaccgctcgtactgattgttgcccgggaaaagaaggtcgcttgaatcaaatgatgtcgacgcccagtataatcccagcgcaacaatggggcaaatagaaggctggagcgggtttgcgtaaatgtaccgaggatcccttggatgttcaccgccttggtcgttcttcatgtgcgcgaagtacatctgaagtgcatcgcctctgcattccatatgcgagtgtcggatcccaaaggcattggacgagcgacgcatgagattccaggcaatgaccatgtatgcatgagaaaacgccatctccttgccaggaagagtaagcattttgccacacaaaaagctgtataaatcaaacatcagcgggtctttgcctgtcttgatctcgctggctccgatggacgcatccttagctagcttgtgctttagccccttgaagtaggtggtcaactccgactcgagcgtcttgctcatggtatgaccgaagtcccgaaacaggttgaacaagcttgctctgtgcgtgttgagaacagagtagctgagtgcaccgccgtctttacgctggagtgtgatcagccaggtgacgaagacctccgcgtccaggagctcgaagacgaaagggtcgatgcgcggcttctggttgatcacctccttgatatgcgcccgtagctgttggagggagtacgcggcaatgtctccaagacgggttgcaaactccggtgcgacgagatcggctttattcttggcaagccacgcgagaaagcgacagtaggagttctgataggtggttcgggagcgagctgtgactgtgttctcgcgaatctggcggacctggtcttttaaatgcccccaatcgtagccctccatttgcggttgtacttgtgtccgacgtcttctgtgctaatcgagaattgcgatcgtcgccacacgtttacacagggggcaaaaactcgtttttcagaaaatgttggacgatgtgtccgactctttaccgtgaacgcctaaaataaagcgccccgaggaccctaaaggaccctgggatgaacgttcatccgggtcgtaatatatatagggtccaacaaatcaacaaaagtcaaatcgttagggtcactaatccaacgatgcggcgagttcatgcgattcttacgcttcggcttcgctaactggcaagtctcacacatgggtaactctcgtttcttcggcatcataacgtcaacgatgctcttgtacgacattgactttaggtattgagtattcgtgtgcccaagtcgggcgtgccaaacacgaatatcagctagcccatccatcttcgtgaagttcacgacttctgtagcgcgcatcgcctgccgagagccatcctccgtaaccgagttgtaactacggaagctctacacgttgttcggctgcagcgttgcagccaacagaaacctatcaccgtcatacacgttgtacgcgcccgaacccggatcctgcacctctgtgagaccctggtctctcacaattcctgccgaaaacaaattccatcgagcgctcggaacttataacacccgatccaaagtaaacttcttcatctcaccattttctgacttcgttactagttcagcaacaccaacatcgactgcatgtgtcagcatattttgtgcaaacccagcttagtttaaattagagttaattatactcgggcctccgagtatagattaatcttaataaaagatccaaataatgtttttgggttaaaatgagaactgctatttttgttttatgtttctgacttcctctaaatgtaatattctaaactgagaatctgtcaacggctggttggcggaattccaatgctatgcatgtcgctcattggctaaaagatgctgctttcagccaataggaatcctaagtctctatggaccacccgtcgtggtgatcgtaaatgtatgtagcatttggtgtatctacaccaaggacgagaaagtctttcgaacctctaacagagggggctgcgagttgcggagcaggggccagaaatgccgttttacgccggcaaaagggaccgccgcgaaaacatgtctgggccctctcatatcgaggttgtagcggacgtagatgatcacgcaggtgatttagctggtcatagtgctatgaagtgtaacagggttacacgcacaagtggctacagtcacttgtaactctaacagacacggcccctcctgctaaatcggagccctccagcgaatcgggcccgatgtatcggatcttggaccacccgatttgccaaaacggatgaaagccacaatactagcgtagcgaacacgctctaagagcatctccaccggtcaacaaaaattttggcaatagaggatgttagcaaattggtattttacgagttggagacaaagacactctaccaccgctctctatgttcccgaactcgtaagaggggagtcgtgttagtacggaatctcccgagaaactcgtaaggctttttcgcgagactacaagccttctgattggctcgttactcccatcctgcatctcccccttgagcaccatggccgccatggcgcttacaggtacatgtagcaccgcgactcgaatcgagtcgcggtggttcgagtcactcgaaccacctcatccagtctcaagtgccccccccccccctaatccgtgtgacgtccttgcctctcccagcgaggcacacaaggatgacgacgattcgactgcgcgtctaaagtcataacggcgcgtcgaagtagagtaggcagccattgaccacaaagagcagcataaagtagaatatgttgcttagagtagtgatgtccgagttcctgatcgtactattcgtttgggtatgtcaatctaagaagctgcatggcgcctcgatactgtagcgtttgattctatcgcgggtgatgacgtcgagaaatgtagcgctgcgctgagcgcgcgaatctcatcctcggtgaagctgaagtacctcttgcagtacgcatcgctgtgctcgttgagcctcgaactcctgggatgatcagtcactcggggctctcagagcgcgaagcagcatcgcaggaggggaggggggggtctgagtgtcggtccgttaggtggttctgcggcgaggtgagtccagctagttcggcaccacagcagcggagttttgaaccgtgagcacgggggggttggctgctgcagcgaccgaaaaagctgaactgaggaccgcgacaccgctcgtaggtggtggtcgtacgagcgctctgtagtgcagaccactcatcatttgcaccgcgttttcatacaacttttcttaggattactcggagaaattaattttgtggcaacgttgggtgccgatggtcgatcaatatctagtatacatcattcaatgcggaaatttacatacaagttttcttatgattactcggagaaattattgtgcttcgcaatgattttgccgaccattttagacgctaaatatggcaaagcctgctcctatatatgtgtgaaagaagatacacgacttgctaaaattatgcataaatccacctcctcatatatatatcgacttgggagggcctgtcagcagccatagacacacggcaattatgcataagaggttggatgtgctgaggatcatggacggtggtgtactgggccaatcagaggtcgcaaacggccagccgtggccgtacggatagtttttggccgtggccgcggctgtccggccggacaccacggccggctgcggataaccgagattcattgcgatatcaactttagctgttctagcttcgattgttatagccaaaaggactgctcttgacgttgacaatgagtattgtggctaaaggaagcggtattgagtcctccagcgttgaataatattcgtatcaccagtcaaatgtagaaatagcttggtacgaaaaaaaataagctgttttacggccaaccgaagccaaaatgccggccagccacggctggtcgaatgaaatccacggacagccgaatcatgcctcgaggttggcacggccagatacggacaaccggttttcagcatttgcgacctctggggccaatgcaggtgcttgtggataaaagtcgacagaattgcagctgcacaggcacaattgcactttcaaaagtgcaattgtggtgcttttagcgtaattctaggcctccaccaatttatgcacctcgatttatcgtaaatctagcaggtggtcgctataaatacagcaaatctcgtctgatattgccaaaatcacaataattttgcggcaacgttagtgcgaagcaggcgcagcagatgcgtatcaaatgttggcaagttatgttcatttaaccgaacaattttggtttgcttcgacgaaattgcatattcaggcgcactaccagcccaatcctctagttagaggatgttagcaacttcgtaaataacgactcaaatttacggtcaacatttttatgtgtttagttaaaacgaaatcgtcgatagtgttagcattctcgtatccgcccattttcgaaatccaactgactcccagcgatagaggccgccctgctgacacgagatccctgcatccgacgccgcgctacctaccgtgcctcgcttcatcatcctctcgcctttgtgcattctatcttagccgcatactgctgaatgtgtattagacttaagcattattctatcttggtcgcagcgcgccaaacatcctccgcgcttttgtagatagatcaaatattgctgcacaaactacttgcatagcaactagaaaaccgggttgcccgctatcggcaaataccctctcctccttcattcaaacatttcagagctggcaccttcgtacttaacgtttactcttaagctctggaaaccaatatcctactgaagtagtttgccactccaccgaaaaagcctctgctttacgtgaatttcaagaaaccatgcgatttctgagattgttaaatgactttacttgatttcagtataattttacttcatgtgcgccacatatcaggtgcatcgaattaatcctggttgggctgtccataccgtgcaggttcggacaaattcatgtccgaaaattaggctcggacaattctataatttgatatattatttttaacagtgataatgtggcacactgaaaaataccacaaagcaaaaaggcaagtggtgactctcggtctcggggagatgctcggtctctggcagcagcaggagttgcaggaaggacgatggcggtgtggatagcttattggcgtcgggcggggcgtccgctgctggtagggccctcagggccagcagctggacgagcaggatgaagacgaggacgccgtgcaggatggcggctgagtgaaggagggggagaacaggctggacggcaacgaggcagcagctcgagcaggagaagggcgtgatgcaggacagcagggcggacgagtaggttgcggtgttgccgacgccggagctggtgtcggcagccacggcggcggtgacattgctggcggaggcggtgcaggagatggagtcgacggagctgctcacgttgaagttggcagcagcgtcggtgctggcggcgttggtgtaggtgatggtgttggcggtgaagttggctcaagacccggacgcgcagcagcaggagcaggagcaggagcaggacatgcggctgtggtctcggggggaggccttctggtctatccgcggctgtacaagctgggcggtggcgtgggtttggactgcagctgcgtccccggtccagtacggcggaagcagcagcacctcgatgaggtggacggcggcgcgccggtgctgcaggacgcgtagaagtcctgcagactctggacgagacggcgatggcgcgacagatgcaggcccgcgagatggagctgcccttgctgcaggaggagggcgggcctgtcgacgcggccgcgctgagcgaagaaggaaggagcagcaggccgccgaaccagacgaagaagttaaggaggggcaagccgacgtggaagcgattggcgctggcctgcggactgatggggaaggacgaccatcaactcaagcgctcccagcgatctccgcggggcagatgctgcagaagctgcgcgtcgagaagaaacgctgaggggagacatcgccgtaccagaagagctggaggaaagcggagacggccaagcgttcaaggaccagcgataccgcgaaaggagaagcgaaaattgagagaggtagcacgcagtattacagttaaataaatatttattatatttagcggatggacattgtttttctgcagagttgtgctcgaggagcattgagaccggaagacgtgaacgctcttctgatggcgaccttcctgcattgcaagatccctgttcaaatcgatatctgtccgaacgagcacggtatttttaaaatatgagattgtcttgctttcactaagatcatatcaaatatttgttttaggatcggacaaaatatgtccgaattgtccgatttgttactaacagcccaacatgacctttggagcactcccatttgtccaaacagtacgacaaaggcttctgataggtgaattgctagtgtcatattgcaatgcaaaaattggtgtgtccgaactttgatgctattctaccataccattccatgacggtgccgacatcggccgacagagtgcctacaagctgggattggctaaaaaaagcagacacatcatgcacatcgggcatggtgcccaggcggtaagcagtcaaatgcgcattgctccagcagtgccagatcaaatcctggcttgcaggtgtcaggcagtaacagcctgacacctgcaattctgccgctattaccaacttaagcgtttgcatgttggttattaaaacagcagcattagcgctgtgtaacatacaaaaacgcaatacatttctcatttttcgagagttcatctagctgtactgtattaaaagcattgaaatttacacggttggttagcgctcgtcgccttcgatgcagcgatgcagtccttctcacttttgcttttgcgctcaccccgccggcgatttgctagcgattcacgtcagtgcttagtaagagtggggagtcttttttttggtgcgcgtctctcttcacgtccggcgatttgctagaccttccacgaacagagatgcaatccattgtgggtagacggactaggggcggtccaatgtgtgagaatcagagcggtacatccgagagacattctctctgtggattagtggtagtcaatttcgcagcaacaagaaggattttattttgtagagccttctgcatgaatatatttgaccaatcagcgttgggtcaattgagcaccccaaatcgaagtttgcagcaacaaagacgatttcttttgtcagtttgcagctcacagcttgctgcaccatacatgcgcttcgcgggcttggacttggatgccgcggttgtcggcgcgcggaaaggagctgtgagatctgcgtcgcatcacagagcaacggagcgctgctgcaacggttcgcgacctcctcagcgacgctgattcgttggaggacgagctagatgactactggcagctggaactcgagcgcgttcaatcgacgcgttatctggatcgtccggcgcaataccgacggaggaaagatcgctggctgaagctgttgcgcgaccatgattacatgaatgacactgagttccacgaccattttcgactagatcgtgacgtgttttatcgcctggtggagttagtgaaagatgatccagtgttcttcacaaaggggaacaaaccatttcgtggcggcgccgagcttcacattcttgcactcctaaagtttcttggcccctatggaaacgacaactccggagccaaagtgggccaattccttggaattgcaagtggctctgttcacaactatctgtttcgagcttcaactgccatcatgaagcttgaggacgccgtgatcacttggccagatgagatcgagcgtcgcatgatttcgcagcggatgcaagacaagtatgatttcgtgaattgtgtgggtatcacggatggaacgctattttctcttgcctcaaagcctcgccaccatggcgaagattactattaccgaaaggtatcctattccgtaaatgggttggtgacgtgtgatgatgttgcaagaatttgcaacatcgttgttggttggccgggatcgactcacgataaccgagtttggatgaacagtccaatggtgcttcatcctggtgatcacttcaagtccaacgaatacttgcttggtgattcggcttttcaagtatcggccttcatgatccctgcatttaagaaccccccgaaggctcaaatggattcgcgccacaagtacttcaacaccaaacttgcgaaagctagaatcaaaagcgagcattgtattgggctcttaaaaatgcggttcccctacttacgtgaaatccgggtgaagatgagcaagaaacgaaagcacatgagacgcctgattcgctacgtcacctgttcggccatcatgcacaaccttctgattgcggagccgattccacgtgactggcaagctgaactcgaacgattgatgacgggcagactggacgacgatgacgagttgaatctacccctccctgttaacgcaaaagggcatgaaagacgagagcagctcctggcatacttactcgagctgcggacgtaacggtagcagaaggtcgatctcgtcggatgagatgccctcatccaacaatcattttcgttctcgaagcagcgcgattttgcgttgctggctccagtgctctgcctcttcgcggagttttgttgcttgagcgtttgcctcgccaatccgtgccgcagcaagaaggtcttcatttttcagttgttgttggcgtgcaagaaactctttttcacgaaggccgagctctttttttcgggcgtccagttcagcaagttggatatcgcgttgctggtctagttgggcttgctttaatcggaaaagagccgggtgcccggataagtcatttttcttgggcttctttgtttgaggttgagcgatagaaattggaactgacgtcgatcgcttcgccgccgagttgctcactccatgactcgaaacctcatttgtgtcggtagcactttcatcactcgaactgcagtcatcactctctgtatcatctttgcgaaagtgctgatcggtgttcaggagctgcgcgcgggtgcttatacgactatgcatcgtgtcgaatagctcatagtactcggggcatctctccagaatgtttgcacgcagtgtagtctcatcttccactccttgcccagtagccgaaagccagtcaacagctgcacgaaacgtcgactccagtgacgcaatcttagacataacatctttcgcggttcgagctgtcttaattcctttgatggaaatcaagtgcacgatttgctgagcgagcgcagttttcgtttcccctgtctgggcttcacccccacggtatcggtcataattatcggcactcgcgatccagtcaatcagcacgctcaacgagcttacatcttgcgaaggtccatcgttatgccatagcacgcgcttctttccggtcgcttgaggtgcagccgcagtagcggctagctttaccagggtgttgtagcatcgtcttccgcacgtagctttgtcaaatgagccaccagcaccgaatgcatccaacattgctgctacgcaagcagcgtgggcttcgcgctcacatcccggcctactgcaagggcgaaatgacccgcctccattcgatttgttaaccttcttgcagtctttccatctacagacggatgctacagcagcacctatgacggccgcagcttcatgacgagttgcatcagctccgggtgtttgccgggcattgttgtcgggtacggtatcagcagtgacgggcggtctggtttcctcgcatcgatcatcattgtcgctgtccagcattcggctaaggtcgttcagacgagcaatcctgctgggtgctatgtgcactcctgtgctgatcacgtactgggggtccgcgcagtttagagtagtcgtaggagctggagtagtcggaaattcacttgcacttgaaaactctgacggtcgtaggggttgtacggcaatcatgataactggtttcggacgcttgatgctccaactgggtcgcgtgagagcgccgcgtagcggcgtcgtagctggacgccgctacgcggcgctctcacgagctcctcgctgtgagccggcctagtgaggtcaggcgctctactgccgaggcttggctgtgttggggcggagctggtagtccctcgactagacgggatcgtccctggagcagctgctgcgccagtacgagcgcggcttgaccgcgaagagcgcggcttcgtcttcttgcccatgagctcttcaagttccgcgcggcgaataaataattgaacttgttgctgcgcgccaaactgcgtgagttttgttgcaggtgggcaatttttttctggccaatcagagccctagaaaatatttccatcttgctgtgagaaaaaaaatcctcttgttgctgtgcaattgactaacactattgtactcgatcaacaatgcggtgcaaacccggggttttttaaccgtcgaggatttggtgccaatcgtgcgtcgtcttaacgcggctgcacccgaggaagaagggccagccccccatggcgatgagaagtacggggcgtattctatgcaagcactgcatgaagcgcttcgcgccaagggctatcagctgcggtacctgaacagtaccaacacgttcaactgcagttcgcaaaggtggttcaagaagattcctaggtctagttttaggcaccttgtgatcatcggtaggccatttggccaagaagagggtgcctggcactgcatcgctcgcgcggcggtgggcgacaagcactacttcatcgactcggacgagctcgtctacaagccaagtaccgaagacggattacgccacttctttgctagtctgggctgtgtttacgcggtcgagccgattaactaccaacaataaaatccttcttttacacaaaaccgttgtttaatctgtaacctctgggtaatcataaaatatcctttaagacaggaacactcttattttttactattaaaatggctacagtaaagatttagagtggtagcacaccgcctcggctgcagtgcaagatgttgtcaaatgcatgagctgattaagagtagatcgatattaggaagctctgtggcgttccagcagttgcgcacgaaagtcaaacgcgcactacatgctgtacgctatacatttatcgaagtgtaatgtgtagcggtgcagaacatttactatagccccacgttagaaactataactcaactacttccgtgtaaacagctcttgcgtttccttgggcgcttggtccgttacgccaacgacagcaacgcgagcacggtacgcgtctactagagagttgagcttgctttccaggaaaaacttgcgcagttgcttgagtacagctgatccacgtttgctcttgactccgtgctcttcgaaaaatctgtacaccccggcttcggcctcaattccggtacgaacaacttgatcggtgtagtcaggggccgacgggtccagcgcgaagccgtttggtaagaagagcttcatgtagttcacggtgtgcttgtacgctgattttttctgccgatccgcacacacgtcccacatacgtggtgtttttgcgtaccactcaagccaaatagccgctgggcctttcgggagagccttgcttccacacgacttcgatacagtagcggaatcctcgcaatgcgattgtggtgccaccaccggtgccggcaaacttgtggaggagtcaccctgactaacgtcgcgctgactctccagttgggtgacccgctcggtcaaggctcgattcatggctatcagctcgccgatgatgcagttctggtgattgatcagcttttcttctcttatgaatgcctccgcgtcgtcttgagattcctccagatcctattgtgccaccttcgcctgtagttcagagctccacgcgagaacttgagcttttggtaaacccaacgccatcaggcattcgcgcatccgggtagcgtacgggcacatcgggcagcgctcgagtacctcgggaaaatgctggatcagcgcggcagttagaacttcagtgacgcctcttctcggggtcttgggtgcagacgcttggctggaaaagaagatttcccaagctcagtgctggcggagtcgaaccaggagagggttggaaccggtggcttcttgttcgagtcccacccgctgagaacacgtgctactttctggtcttcaatggttgtgttgaacacgtaagcgaaagccttgttggtagccgtcatgttccacgaaccacgatcgaaaatccactgagcactgagcagtggatcaccgtttgcatgctgagccccaccacgtcgaaacgagtgagacgtcaagtttgcagttggcaccgctttagcttgagcggcagacgctgtcttgataacgcggttcacgtaggcgtggatcttcatgtttttttcaggcaatttacgctttttctgaggcggctcacttggcgtgtcgtcattctcacaggcaacaagagcttcagctagtggcacgtcaacaggggctgtcatactctcgtcgccgcttgcggcaaggtgcggaggatccagcagctgtgcgcacggagcgtcctgcatcaccagggccatcgcaatcgcatgcagggggcacgtgatgaagctgttcttgtcgagaaagagagagatgccctgctcgtctgaagtcttcacgcggatgagccggacgaacacaacgccatccgcattcacagacaggtttcccttcaccacgaaccccaggtctgaggcgcggccaaacgcgtaccacatcagcgccagtaacgcggcatcttggtagtccttggggctggcggcatcatagtagagtccgtccatgagaattcgtaggtcttccttcgtgcaggcaggcgccttcttgaccattccaccttcgatgcgcttcagacaatggcgctcgagcgtctgtcccatcttgagtagtttcttctcgatggtggctcggtgggtcgggtaggtgtcgagcagccagttctttacatggcggtagtagctcatgaccgagttcttggccagcggcttccctcctcggccttcgacgaaggcgaggtgaacgccatagcggtccatgagcttcacaaacacagccccactctcatcatctgcgagagaggcagcgatgaagtccatggagacgccttgggccatgacgaagcgtccgaaggcgttgattgcggtttgtagagcgcgctgggagttgacgggggcgaggtcttggaggctcatactggttccgagtgttctgtcggcaagagggcatgatgagcagtagactgatggctcgtattgacgccctgcatattttcgcccccgtgccttcggcacggcgtcggcatcgttttaccctacacctaatcaagctcattggccgatattgggtatatctagatgtcattggtcaatatacgtgcattgcggtcagtctacctatacttaaatcaagtaaaaaaaaatgtgtcggcaccgtcacgatatttatccatacggaaaagatagagcccatgtttttagtcagagcgggtgaatgaacccaaatctatcgggagcgtccaagcgaaatcgacaccagcggcatttgagaggcatgaagagcctgcaaacttcaccccagtgccatggctagtcatggtattccctccttaacgctgggtcggtcttcagagggattaaagcgccggcaaagcgacttttggcagccgaagatcaccttagcccataggaattgcatagtgtttgtaggccatgacacccgtcccacaagctgaacatgtttggccatgtttcaacatgtttgaccatgtttgagatttcttacttgattttagtataccccttaccctaaaccgtttagaaaacatgggctgtatcaacggccttatccatacttcgtaaccgaagcactacagtaaagtgcgtcgataaggaacgcctgatatataaatcgttatcctggtacagtaaagtgcgtcgataaggaacgggcgacattttatattcttcgacaagacatgaatcctcgcttgtacccataaagtgccaaatgtactgaattagttatatgattctaccaatcatttaacattccgccaatcacagttccgaaaccgagcctcaagaggaatctaaaggtcgcgagagggaatcatgaggatcgctgtaagcgcgggaatcgcgccaggtcatgtctgcgtgcctcattaaccaaatttcgctctgctgctcacaactcccatggtgaccgccacttccagaccgttccagacgcggccaagcttcagtcgctgctagtctgtcatcaccgtcgtgatctaccgggtgctacctgtgctgagctggctgcgtgggctcaaggcaagactctggtcgcgaagtccgacatgaactacatattgcagtaaatcagtgcatttgctgtctgcatgtgacgagtcaaacctttaattatcaatatacctttttctttctatgcatgtggtgccgtcgtgcaaaactataattgatgtggtgtacacaattttcaactgtaagctgcgatttccattcaaaaaccaaagttggagatgggtaggcagcctctgaaggagggcggcggtcgcaaggagcggaagaatgtgcgcacgtccacgactttcgagacgcggcttgcggtgatcaagcacttcgaggagagcggcgacatggcggccaccgtcgagcgcttcttcccggcgctgagcgtgcaggccaagcgcagcaagaagcgcgtcgtctacggctggattaaggaccgcgagaaaatcgagaaggcctgcgactcggtgggcaccgccaaggcgcatcgcctgcggaagtctggcgtcggtctcacgcttagcgacgacgccgagaagtgcatcgtggtgtggctgcgctcgatgcagaagatgggggtgcccgtgacgggcaccatgctgtccgagcacgcgctggatgtagccaaggagctgggcatcgacagcgcgctcttcacggcgtctgttacctggaggaagagcttcctcaagagacacaacttggtcatgtagcaatagatggagaatgtatgcggggagcggcgctgcctgcaagtgctgcgctgagtagggcttgcaaatggtgtgaacaatgaactgtgtcaagctgtgtcttattgagtcttagcgcgcttgtattggatggttggtgtgagtgagggaagcactcacctgtggcgtgcatgtcgtcgtagtgactaggaggacatgcttgccattccgtgttgaaccctaggagacaacatggctacggaatcagatatctgattctttaactgccggggagctcgatacgtcactcctggcctcgccgtcatgctgccgtcgtactcccccaaaggccgcaagcgctcgcagcagctgcagctctggaagcgcgtggggatcgccggcggcctcttcatcctggcgctgttcctctgggtgcagtacaccatcctcaccaccaacttgggcggcatcccggcgcacgtcggagagctgcagggcgccacgcagcaggactcgcagcacccagacactaatgagcaggcgcatcttcgaggcaatgagcatcacgcgggtccggcagcagcagtggggaaggaaggaggcgacacggaagcagtaaatcacgctgcgggcgcaggtggaggcggtggcaccatggaagagatgctggcggacgaggaagtcgccgacgtggtcgatcccgacatgactgttaccgccgttccctccgaccagcaagaggctcggcgtctggccgtacgcaaggccatgaagtttgcgtggggcaattacgaggagcacgcgttcggcggagacgaggtcgacccagtaaacggctggaagctcagtaatgtgtggggcgacattgcctgctcgctggtggacggcatcgacacgctctggatcatggacttgaaggatgagttccagcgtgccagagactacgttgccaaccagcttgacttctcacatttaggacgcgacggcaacaaggtctcggtctttgaaacgatcatccgcgaagtgggcggtctcttgagcgccttcgacttgtctggcgatatcatctttaagcaaaaggccaaggagcttatggaccttcttacagctgcttacgacgagaaggagggtgtgttttacacactgttgaacccgtacaccaaggagaaaagcttcgctgcgtgggctggctatcggtaagcttgcttcccgaagttctttgaactcgtttctggtgactcactccagataccgctattcgtcactgcagggctcacattgcagacatcggtacgctccagctagaaacacggtatctgtcagacatcacgggtgacccgaaatatgccgagatggtgggaagaaagaagactccagcaaatcagttcttttttgttggcggctaacgtttggtggatgtgactgttgcaacacagggcgacgctttctatcagatcttaaagcgcgaaggctcatacaagaagacgggtttgtttccggtgcacttcaatgctggtcgcgggaagttcgacgctggaggaagcgtgatcacactaggtgcgctgggcgactcattttatgagtatttgttgaaagtgtacatctacagtggaaagcgagaggaggacgagtatctgcgtcaattgtacgacgacgctgtgagaggaatggaagagcatctactctactattccattccagacgacctctactttttgcaggaacttaaggtgccatctttttcggtacgtggctccacgctatttgcaaaaagcggagatgcggtttctcacatcgcctggttggattctgtattgcaggctgttcagcgcatggatcatctcctatgctttgtgccgggactcttagcgcttggaacgctatcggaaacagaggatcacgcgaagaacgctaagcaccttgagctggccgagaagctcatggagacctgctaccagttctatcaccgtcagccgacgggcctatcgccggatattgtgagcttcccgaagatgcgggtaattgaccccaagtatcgccttcggccggagacgatcgagagcctattctacctctatcgcgttaccaagaaccccaagtatcgcgagttcggctgggaaatcttcgaggcgctcgaagcccacgccaaagtcaagcacggctacggtgccatcctggacgtcacaaaattgccggcgcaggcggagaacaagatggagagcttcttcctggcggagacgctcaagtaccattacttgctgcaggcgcctgagagtctcattccgctcgacaagtacgtcttcaacacggaggcgcacccactgcgcatcctcagtcggggttaactgcgctcatgggggtcggcaagtttgataaatcgataaataaaagttgcatgttgcgttgcttagctacgtgcagcaacgttttatagctgccgggattcatcatgcacatttcctctccaaatcacttaaggctcggctcgcattttttcagtttcgtggcagacacgggcaggctgagcagagcaaactgctgcgctgactggtgcaacaaagcgaacggggcccgtttcgacaggtgaacgtctcctctcagcgactcagcttcgcggtcaggctgtcgccaatttctcaatatgataaagatcgtgcgtccttcaggtgtgagggccttcctcgacgccatctgctgctgctgtgtcaagcgctcgagtggatcacgaattcaaagaccggctcgtcgagcatcgctcgatctgcgcgccgtgcatgcagggcctctagcctgccaggctgcctggaggtcccgtcgagcgacccgctgagctccaagcgggctgcaaatatctaacgtgtggagcaatcgaggagggtctaccagcagagctcgtggcgcggctatcaggggatgtaccattctggtctccgatgaatctgcaagttgaagattggtagacgagtcttagccgtcgtcgatgcagagacgtccagtgaaggccacctcgatgacggccaaggtgaggtcctccgcgccggatggtggtccagttgcaaaccggcgtagagcggtgtgtggattacacgaatccgaggtgatgaccgtccgcggtggcagtgggaccacactgtcacgcaagtctatgcaaccttgaagcgcttccgagcatttgattggtcagttagcttcaatgtccaaatgtgtatgccttaaaattatttcgagctggccactgcaactctgtctgcagggtggatatctacgcgtgtgctcctttggcccgaaaatcaccacaactagacctacaatattgtggctcgcagcatgtgaggttataacattcgtgtgtagactgttaaatcaggaggcctgttggtcggcgctctgtgttttgcaggcgatggattgctggtatgtggcgccggtggaagggaggcgaggctatacagtagctccatcctgaagtcctcgcttggcggtacaattgtgccttgtcatcagtgaacatgtcagcaggaaagcagattcgaggtgggcgggtgaagactcggcctctttaatgttaacactttttaatttgcagagatgtcccgcgatggtcaactcaatggcggttttcaaaagagacgttgacattcagaaaaaaaggagcaaatggtctctgggttggtccgtgtaagagcattttgttttgtttacgcaaaggcattctcgctacatattcgagctcacgaagttttttttaagaatccttactcctgtccggttttaggcaggtacccgtatccagtcgaaaaacagtacgtacaatttcggtgttgcccctgactcagctctcagagcgagttgccgtcagcgtcaatggctcaacgcgttttcgtcaaagaccaacaacccctcgcggatcagcgactcgctgctctgactcttggtgtgtgggtgtacctgtaggcggtaatgccaacaccgccggcacttgtcgagcgtggcgcaactcgctcaacacacgccccgaccggttgggcgccgccttcagccacaactcaacccggctggcgcagccaacgacgacggggccactctcctcaccgccggtcatcccggacgttgacgtgtacgccagggcaagaagaacaacagcgtctcggtgcgttgacgccggcgctggcagagaccaaggcacggtctcagcgaggcccaggcttggtctccgttcgcccgctcgacggcagccatcgcctcccgacagccaagcctgcgatgctgccgctgtcgccacgcccacagcagccgcggtggcaggcggcccaatgtttcgcgcaaatgtttgcgggcgacactgccagcgcacttggcggcccgccaagcgcgctccgtcttcgtgcagcccgatccgacttcatttcagcgcgcgaactgaaccgacacaaacttcgcacagctatgaacgcggactaagaattcgaagtgcccgtgtccgggtctaagtgactcactgacaaaaacagagaaggttaaacggggcgtctattctcggacagaggctcgcggctcatctgcgagtttcacacaaactttttttcgcctgtcgagggagcgcgctgcctaagaggtcaccatggccccatggccaccaccacgcgccggagctgccccgcggggacggcccacaatcgtatttgaggcgagagcgcgaaacgcccgtgccctgaacgcgcgcgctggacgcctccgcagacaagacgagcatgaagtcgcagctggcgccggccgagccggccatgtcggagcaggactccgagctgctgcgcgagttggccgagacgctggcggtgcacaacatccagcagtacaacacgctgctcaagaccaaggagggcttcgcggacagccgctgctggaaggagctgcgccgtaaggacggcgtacgcatctaccgcgagcgcgccaagcacaacggcatccccaccacgccctcgctgctgctgctgggcacggtggagggcacgctggacgacgtcatgtacagcgccgtggctgccacggaggaggaaatccgcatcaagtccaagtgcatccaggatggcatcgtcgactgcaaggtgctgcacgagctcgtggcgcccacgctggacgacccgttccaccacgtgagcgtcaagtggcgcctctacaacaaccagcgcgactacgtgtcgctcgacacctctggcatcgcgcacacggtcaagcgtgaacgtatcggctacaacatctcgcactccgtggccttcgcgcagatccccggcatgcaggagacgcacggcatcgagcgcggcaacatgtccgtgtgctcgctgtacctccagaagaccccgacgacggtcgagtgctacgtgcgcggctttttcgacttcaacacgcagaacgaaatggtcaacaccatgtccctgcaggccatcgcggcccagtgggcctgctttgctcggaagcgcaagtgcgctctcatgaagaagctcgtgtggcgcatgcgcaagcgctcgggctgcacgacgtcgctgtcccttccggatgagcgaccatgggtcatgcagacgcctccggcgcgtactcgatctcggtgtgcagtgtgctctgggagcttcggcttcctcggcacgagtcacaagacgtgcaagtgctgttcacgccaagtgtgcacgcggtgttctaccaaacagctcgtgtgcattatggctccagaccaccgcactgtgctggagaagaaacggagcttctgctcgacgtgcctctcagacgcagccaactgcgacgccctggaagtggcgcgagaggagctcgcgagctcgaaggcatatcgcgatgcttgcgtagcaaaggcccaggagatggcgcgggcatccatgcaatgcgcggtatcgcgcagcagccgaagtgcagtctcgtggagtagccggatcaacagtcgacgacaaattgctcggagctccatggtttgagaacttgaagtaacctatctagcgcgtgtgtacctccaacgtgatgttatgcaaacaaattactaggaaaccgaaaatatatgagtgaatttagttgcacgaattgcggttcaacttcaggttacttcaattacactttaaaaggaaaagtcagtttgccgacacgagtctgcactcaggctcgaaatgctactagatcgctggcgcagacatccaaaatgtgtttgctgtctcggcactgctccaagacaacctgccggtggaattccaactggaggcgtcttgttcgtggtgttctgctagcaattcctctcgagcaatcgtcagcgcgctggcgttatgcgcctcactgatgcagtccgagcaaaatgtacgcttattctcgagtgtcgtgaaatggtcgggtgctacggcacacacgcgtttcttcgtgtagcatttcgagcaaatttggcgattacaacccttgcaagtcgctgatctcttccggcatacactgcatcgagccgcgataaggacccttgcagctaaatgagacgatctcgtggaaaggggcccggaagtcactcaggtcgtcagcgaaagagtacgttctcgacgaggcgggactccacccgtagctcttgcgcattttccacgcgagctttttcacgagcgcacactcgcttttacgcgagaaggcggcccactgcgaggcaatcgcctgcagtgtcaagttgcccagcatttcgttctgcgtacgaaattcaaagaagccgcgcacatagcactcaatggtggttggcgtcttctgtcggtagagcaagcaaacggacatattgaggcgctcgatgccatgggcggcctcgaagctcgggagctccgaaaatgcaaccgagtgcgagatgctgtagccgacacgctcgcgcttggccgtctcaatgatcccggtggcatcgagcgacacatggtcgcacttggcgtcgaagagtctccacttgacaccgatgtggcggaacgggtcctcgaacgttggcagcaggatctcgcagagcactttgctgtcttggacaccgtcttgtgtgcacgcggacttgatcttcatggcctcgtcggtgggggccactacgccgtacatgatgtcttcgagctggccctcgatggtgccgagcaaaagcagctgaggtgtggtcggcccctgcctcgtggccactacccgctccttgtagacacgcactccatctcgtcgccggacctcgcgccacctcgtcgggtccgtgataccgtccttggtcacgagcagcgtggtatactgctcgatgttgtgcgccgtcagcgtctccgcgagggttgtgcagcatcgtggcgtggcacgtagtcagctcgagcgccgtgcgtgggtgagcactgcgaggtgagtgtggtggtcagcgcagagggaaatggcccgccatggtgagttggcaccgacgtccgtttgccgcccatgcttcataccgcggtctccatggcggtgtagctttggttgtggatactcagtgatgacattttttcggggcgccctagttgcaccacgattccagagcgttgttaaccagccgtggcgggaaactcttgaacagagtactcttggtcgagggatatcgttccgagtatcgagatcactgttgccgggtggattgtaaggcgcttatggatttttcctcttttgatcttgcagatttacttgtcggccagctcctcgcgtcatgctaccgacgcgcaacatattcagccgctatactagtttcgatgtcccgaagatggcgaggtgctatgcggattcagcccagcttcggtggggctgacgagtccacgcgtgcccccactggacagcttgccatctcgacgcccctcatcagctgcgtcaccgaccgcagcgtccgatgttgttccgccctcgtcttccgctccgaacatcggataagaagagtccgtgcagagcagtgaactcgctacgtttacggtggtggttgaccatgtttgcgagcgctccggcgacaaacacgctcaaaagcacgggcgaggcgactattcttcttgcctactgactcttctttgataagggaaggcacgccggtgagattcagctgaggcactggcctcgagcctataatttgttctcagaaatgacttcgtttgcacgaactctgaagttgagcgcaacgcgttcgacagtcttggtgaagtgggtgctcacagtcactttggagccccgcagcacactatgcggctcgttcacttgctaccagagcccaccatctccaggcaggactgcgtcatgctgcagaacctggccgacacactcgctggacacaacatcacgcagtataacacccttgtggtgactaaggacggccgcgccgaccctcagcggtggcgcgaagtccgtcgacgaggcagcgtgcgcatctacaacgagcgcattgtgtcatcgacgcattgccccgcgacaccgcagctcctgctgctcggcaccatcgacggcaaactcgaggacatcatgtacggagcggtggccactaccgatgaagccatgaagattcagtcagcttgcaccaaggacagcgtgcgggacagcaaggtgcttttcgagatcgtcccccctagctttgacgacccgtttcgcacggtagccgtgaagtggcgactgtacgaggggcgcgactacgtgtccttggacgccacagggatcgtgggtgttcgcggacgtgagcggatcggatacagcatttcgcattcggtgattctgtcggagatcccgagctttgagaactcccacagtatcgagcgcggcaacatgtctgtgtgcgcgctgtaccgccagaaaacgccgacgacggtagaatgctacgtgcgcggttttttcgactttaagacgaagaacgaagtgctcaagaacatgtcgcttcaggttattgccacccagtggtcggcttacgcgcggaaaagtacgtgtgctctcgctaaaaagctgtcttggaaggtgcgcaagaactgcggctggagctctcggtcctctcgaatatactcgttcgcggacgacctggacgactttgtaacccctacgcgacggcatcgttctcaaagctcccgcgagtccactagatgctcagtctgccagaaaagctcgagttttcttatgtcgattcggcgaacctgcacgagttgcgagctgccggtgtgctccaaatgcgctgtcaagaagaaggtcgtcgcgctcgcacccgaccaatacacagtgctggaacggaagcgctcgttttgtgtttcgtgcatggatgcagtcgagagctgcgacgtcgtttccattgcgagggaggaactcgtgggtcaccaggaagaggaggaggacgacgatgacgacgccacctactgggctcgcctgtcgtccatgaccgtcaactccagctgctactcaagtgtcgtgtctcgacaaagcagcctcgccagtctcggcagcttcgaccgccacagtatcatcggccgagggcacgagtaaggtcgactttttggcgtttcggtgctatgttcgaagcagaagtacatggcagcatacaaaaagatcgcatggttagatgaaagccgcgcgaatatattaaagctcgcagcgccgtcggaagcactgcaacttgaatggcccaacgaataaagagaccgtgccaaaaattccacatacccttcaacttagtcgctcatttttgtacatacgcataaacttagtcatttatcccgtgtgcccaaatctaaatgagcgacgcgacgcccccgctgccccccgcgagtcggcgggcgagcaccagctccgtgagctccgcggccgcggcgcaatggtcgcacgtgggccaccaccgcaccagcatccccccggaggccacattcgacgcgcaggacgcgcagatcaagcaggagctgctggcgctcatcacgcagtacctgcagcaggagggcttcgccatgtccagcgccacgatccaggacgaggccaacgtcaagcgccacggacgcctgcaggagcgcgacgcgcttcgtcgcctgggcgccgccatcatggacggggactgggacctggtggccaagctgctgggcaaacacctcaagaagttccacgccgcgcaccagggcttcctgtacgccgtgtgcaagcaggagtacctggagctcattgaccgacaggaatatcagaaggccttcaccttcctcaccacgcacctcaagccgctggagaaggtggcggtggccacgagctccagtcgtcacgagttcaaggagctgtgctacctgctcacgtgcaaagccgtcggggagtccgacgccttccgtgactgggagggcgtcgtgaggtccagagagaaactcgtggagcagctccgagccactttcgctctggaggaggtgatctcgcctcagcaggacggaggagacgcggccatggcgacgccccccgtggccatgccggacaaccgactcgtgcagttgctgcaccagagtgtggcctaccagatggagttcagtcggtaccaccccaagacgatccccaaggtcacgacgctgctgagagactttgagtgcgaagttctgcctaatgccgtcaagagcacatacgtcggacactcgcagaatgtaaaattcgtcacctttgtgggcaccgacggcgaactgctggcttcagggtccagtgacgctacaattaagctttggcctaccgagctgccggcgacacagcaggaaagtggtgaagaggagacggacgagtccacgggcgcggtttgccgccagtggacaagggacttgctcggccactcgtccagaatttggtatcttgcagcaagttcgtcaggtgaacgtctttattcaggctcgggcgatggtactgtgaaggtttgggacttgcgtgcagctttggaggaacgcgcagcggctcaacaggctcagagtgatgacgacgaccttctaaatggccagcgtggggccaatgtgatgcagtctgcggtcgaagccgctgccgcagctacatcaggtgccactgcagcgattgctgccgccactcacaactactcggtgacgtctgcagagtgtttggctacgcttatgagtccaaacggcggtgacgtgtacactgtgaacctgcacccgagtgagacgcacttggtgactggaggctacgaccagagcgttcgtttatgggacattgccactggtgcggtggcgaagacgttccgcggccacttcgcttccgtgtgcgatgtccagtttaaccgacacgccaacttcatcgttagcgggtcaaaggacggctccatccggttgtgggacatcctcagtggactgtgtgttcacacattgcgccaaacgcttggagaggtcacgtccatttcgatggcatctaatggctacacgctgctgagtggttcgcggaacaacagtaatcgtctgtgggacctgcggatgcttcatactccacgtactcacttgtcgacggggctaagcagcggtgcatcaagcagtgggtccaacgggtcgctcagtagttacgtcggaggcaacgcagtattctccaatggcgtcggctcgggttattcttcagccaacggcgttggaatttcgggtggagctggctacggtggcagcagcagcaacctgagtgcaatcggaagcagcggtggcagtagcagtaccttttcgggtagccgacacgcagagcaacggccgctacagcgcttcaagggtcaccaaaacaccgccaaaaacatcgtgcgggcatcgtttggtccgagggaaagcttcgtgttgggcggctccgaagacggctatgtgtacgtgtgggaggtggcaacaggcaagttgctggagaggctcgcgggccaccgcggcgtcacttacaatgcccgttggcacgaaaagcaggcacttcttgcttcgagctctcacgatggcacagtgaaaacctggtggtggcaagacaagactatccaagtgtgagcgagggagttgttttatcacgcgagttgatcttcgagctcgactcaggcaggctataccacgaagtataatctatgatgttctctattgtttattactgcccgatggcatcattcaaacctgtgcgttcaaggaaccttttccacacgactgggaagaggtcagcgacgtctctagcaacttgtttgcacttctcctcctgctccttgccatctgcaactccacggaacagctcctcttcgaacaagtactcgaggaattgctcgcccagcgcctcgtaagcgcttgagacctcgtccgagatgcgcaggaacgctgggatggctcggaagcgctttttcacggagtctttagctagcttcagcgcctccttcggcagcagcggcttggccctgcccttcggaggtttcttcgagttgaggttacgacagaatgatttggccttctctcggatcgcacgcagacacacgtaccaaatgctcttgtgcttctgcatcccgattacagcggcgtcttcgtccaagaacaagtgaactccgccttcatgttgataggcacgcttgctgcgctcaagcgcggcctcgaaggcgtccacgttgaactcaacgacatcgtaggtgacggtgcgcactccgagagctcgcatgaactcgtatagtagcacggggttcacgcagatctcggcaccatcgaatgagttgtatgacataagcgacagcccatagaacactggcgtgtcttccgacaggtagtccagtagctgcacgtgttggtggctcggacacagcacctcgaaagacgcagtggttcgtgtctgccacaagaattcacacagtagcgtccgcttggctggctcgagtgcaaacagcatgcgcagaatcgccgtagcaatgggagctgcagcaaggaacgggtcgcctccttccactctgtggatttctctcacgcgctcaatgtcctcgagagtccgcgccatcaggtgcgtattcttcgacccaagcacgtagacgaattcgccgtcgctccgcttcagcaccgacaagtggccggcctcgccgttctccttggtagtcgagatcacccacttgctctgggcttgcggcttgatgaagaacttggagagctcgtcctcctcatgccccgactgtttcttgagctccccgtcgtcctcttggcccgtgaacttccggtacccgcgaatgagtgggaagaagtaggccgcgcctccagtcggccactctgcgatgcagttgccccgtggcagccactctctagcgtatcgggacttgaggtagacagtgtcgtcgggcctgccgggcctccccaccttgatgtcgtgcacgacctgcagcccgggcagcagctccggcagcacgcgacgctgctgaactctcacgtccttatcgtcgtttgccttggccacgtgctccttccactgcgacgattctctttccaccgcctgctcgaaggtttcagcgccggcgtgctgcctgcgcacgaaggtctcgagctggtggcgccctttgcgcatgtgcacgagggtgttgccgtctttgccgcgctccagagagtccaggaaggcgcgcaatttgtccgacagttgaggcgaaggagccgcgaaggcagaccgagacgcagacttggtggccatgacgctgctggtgcaggagacgatgtgcgcggacgtcggaagatcggcaagtgcgagattgagcggcaactttctggaagttcatgcaccatcactcgccaaaaaggcactatatcgggaacagacgtcactatattgaggtaaagttgaagttttactcatggtctcagaattgaagggcgtggctttacattaccattgttaactgtgcgaatggagacactagatctatgtaggtaggttgttgctgcgttatcctagcagccagtgccgcccacgatgcgcaggcacgaggtggacgggtagatggacatgatgttgaccatggtggaccacacgagggcgaaggcgcagtaggccagcgtcgcgaagcccaggatgcggctcgagcctccgttgcgcttgagctcgttggtctcggccttctgcttgggcagcagcggcaggaagagtaggccgatcaggttcatggcgtagcggatgatcaggatgtacgtcacctcccagcgcacgtggttggtgtcgctcgcgatgtccttgttggccacgtcgaaggcgccgtcgacgttcttggtgatggtgctggcgaacgggatggcgaggttggagaccgacccgacgaggccgtacaccgcgccctcgttgccctcacccgccagctccaccaccacgtacgtaccgatgacgaacgccatgccgctcgggaggttctccacgacggggacgcccagccagaaccactggttgcgaatgacgtcccaggtcgtgaggaacgtcacaatggcgtccagcaccgtcaccgcgataatcatcgtggcgtgcatccatcgccagttccactggaggccgtacttgcccgtgaagtagagcgtgagcgcgaagatgccgttgccgataatggccaggatcttctcgttcagcggggtcacaccggcccagtaggcctgcatggccgaagacgacgtgatggtgaagttctcgaagatgcccgagaagaacttgtacgcgatgacctggtacatagggcgcgtctgcacgagcccccagagctcgctcaggtacttgctgaagaccatgccttcgtgcttctcctccttgatgaaataccacgtgaggggcatcacaggcagacacaggacggtcaggatgatcatgagctgcgggaagctcagcgagaagttaaagtccccaccgtagtgggtgccgttgaaggcgaaacccgtgaggatgctggagatggtcacgaacaccgtgcggaccatgtagatcgtcgtctgcgtgtagccgcgcgtggcctcaggctcgcgctgagcgacttcgaccatcatagcgtcagccgctacatcggcaccgacgtaaccgatggccgccagcatcatgagcacgatgaacttgctgcccgtggagggggcgtccgtgttgaaggtggcgacgatctcgggggacagcgtcgtgacgttcatcgaggcgtaggcgtactccgggtagtacgggtctccggccttcatgcaggccatgaccagcagcatgatgaagcagagcgtccagccgatgatcatgaaggggcgacgacggtagccgaagatggggacgcagtccgtgatcattccgtagaagagcttgaacgaccacggcaggttgagcagcaccgtggcggacaccacctgcgtgctctccatgttgaggtagttgaacaggaacgggtacacggtgccgggcagcgtgccgtagatcatgccgacagccgcgtactgcacgatgatgccgatgtactcgcggctccagacgttgatggcaccaccggcgcgcagggcgccgccctcgatgtcctcaccgtcgggggtcttcatggaatggaagcccttcgggggcagtccagcggcgacaggcgagaccatgtccagtttgtttgcagggctcgccatggtatatttgtcgacgtctctcgaggaggaccgattgagaagtgagccgagggggtgcttcgccccgaaccgcaacaccgagggctgccaacgtgatgctgcgcatctacgacagccacccagccggtctgtgggccacccgaaggttgttcaattggtcccgctccacgccgctttgcctagcttgtactgtatcgtttggcaccatggagcgagcgagcctagtctggcgagggatgttttcttgggtgttacagtacggcacccgccacttggcatctgtatcgactcattcgttcactatcgaatgcgcgacgacgcgaaagcttgaccgtcgggagtccgggtcgccagtgtaccaccgactttggaccataaacaaccttctttgggacaatggcaacctagaaaagacgagaaccaaaagagctggaaagtgatcgtcaacaaccactttttcgatcactggcaacctgtcctttctactgccctttctccaggttcctgcgctaagccgggcgcctgcgaatggccgctacacacactccatgtacatgtacttgagctcagtatagctttccctggttcaaattcaaaataactcgcgcgcgttaaaatggtccagatgcttcagaataacccgcgcgagttaatttgaattaaattactcgcgagacatcataaagtgagttgtattaatacatgtagaatagactccggttgcgcatgcgtataggcagctattaggagttgttataatgtggcgtcatgcgaggtacggagctgatatgaggccaattatactgttttaaattgaaatggtacgtactagagtatactgtactgtgagtttagtaaagggtaattatacgtgagcatttcggagttcaacccaagcacggttgccacaaagcaatccgtgtgaacaaatgcatacatttagtttgtcttaggatgccaggcaccgcaatgtatcacaacatacccagattgtcccttacatgtgagtatatgccgattgagtgagtaaaacattttagtaaggttcgcaccagttcctgcctctaagccaccggatagccgtttccctctgttatcagagatggtagtggttgtgtatggttacgacgcattgtttgattttatctgtgtggagcatttatacagaacttgcagctctactcagagattcgataatatatagagagtagctcggaaggtatcacgtattctagcgcctcgtgctgaaccacctaagcgtccgttaaactactcagctagcgtggataccttgcatgctaaagtatgtaatgggtcttctggcatatttcaagtggcaacgtatagcccacaaaaatactcagggaaattatcaggcttaagaatttcagcgagccaaccagcatacttaagtattttgttttggaaataaggtatatagagttcacttacactagtaacgagtatccatagccataacgctcactgccttgatgttagtgacaatcagcacactggtccgcattggggtttcaaaccacgaaccatttcgcactgcatacttttaaataaaggagttagacctcaaccaacctctctataactactattcctaggcgcgttgaggtgcaactacaactctgaatttggagcaatatgtatttgtgcactacgatgcgaaaattcgctgggaattgtagctatatagtgaccgacgggtaaatattaaaggcgcacacccttgctgtgagtggcatttgagctaactataagtcgtgtgactttccagtcaaaaacgcttgctctagtagtatttcaatacgagctttccacaataacttcactaaaacagacttattagcctcctcatgaacgttattgctcgttgggcagttacatcgtagccgacgttatagatcaaatttggaatttgaatttgttgggcgttagacggctatctaccactaccattacgatgcactggtgtagcctcaccaacagtccacatgcctcgaggacgcgagtctgcggtagtggtccacgaaattatagtccacaatctaactcgctaagaacgatgtctgttggttcattgctatttacttgtgcagttagttgactatactctctgtacactcgatgtccctcgttcttattcgaatccaacactctctggggtaatgagcattgttggtaccattcttgcaagtttatacaggattgaatgttaacggtatttcacccagtcacacagcttcgttgaaatatctaagcccattttctcacttcaccaacctgatcgtttagcaactttcgagcttgacgcatgtagctgttatgaatcaaactaactcaagcagttttgaatccactgctcatattaactcgcgcgagttgttttgaatccactacttcatattaactcgcgcgaattattttgaatccactacttcatattaactcgcgcgagttattttgaagtagacattaatcattcttagaggtcaataggcatgtcggcacgtggttggcaccgtcctgttcgcggctcagctcgccgccacctgtagacaatgcctgcgtccttttgggatacagcattggttttggtgttggtggaccgtgacacgaacttgcgatatgcggtgtaatacaccgcacagaaaagcaaccacttttaagtacagaaccgagtagtacaggattggttctgtacacaaaagtggttgctgatgcccgtttggtgtggttgctgttgtacaaatcgcaggttgttatcgtcctttactcgaccgtcgggaccgcacgcctggcaccacggctacgatggtgagacgcaatcgactcgctgcactccgcggtaccttcgccttgattgaagctgcagcggagaaataggcgactcgctggtaccgccggcaggtaacctgcatttggccgcaataggcgtcgtgcgtcaatgaccaccgattcatgacccaacaccagagcggcagtacagctactgcgcgacatttcacaccgccggacacacgagcgagtccttggggtttgcatgatgtacaatcgtttgttggtgcgccagatttcatgttccacaagtggaggtttataaaggttgactttcagttcaatcgactgggacgccaacttgactcgtgtagacgatcaagtcacgggaatgccaaaatccagggcccctctccatttttcgtaacttcgtcgacgtaagtatatttgtagcgcatctcagatacgtgtactgtacggtagctcatttgctgcgctgatgcagttttacctcggcagcagtaggctgacgccattgacgaatcaaccgaatggttactactggcactgtagtacttatgtagtccctgcagctccgtcttcgagttgaacagcaacgatggaacaattgcaagtcccagcttccagacgagaggacaggagtgttgctggaatccccaccactaccgtaggtgatcactgtgccaccgcttcgaaaagaggtggaacgaagtcaaaatgggtcgccaggggaacctactgcatcgaatgactcgagagtttccacttcttctgcgaagtcacgccccggacccgcgtcatcttggtctgcaatcgtcttactatcgagtgcatgacaagtatttttctcgaatcaacctacgtaagcctcgcaaccgagacctacgtatttactttgaataaacggacagtttccatgacggcagcacggagttatattacctcctctgggagaatgtgatcagctccccggtttcgttcacttcccacatctcgggcatgtaacacctacttggccgaacttatttattacttcgaagtacaagtattttggaagatttttaaacaggtcttttgcaggtctggtcttttttggtctggaggaccaaaacaggaccgaaataaaatcagcctccaaatgggacctaaaaaagaccctacagaaaacagggttttagaaaactctacaattaaatattcaaatggaaaataaatgtattttgtattaaaggggatattgcaaatgaaagaccatactggacaaaaacttcaaccctgctgtcaggttaactgtcagtcatgctaatccggcttgtactctagctgcccgggccgtccgacttgatgaacacccctccccccgcgagttaataactcagccaaacgatagagtacacactcggtggatccgtcagcaccaatagtctctccatggtaccaacactgtcatacaggcgactcacgaggtcgcaacgcaatcaccatgggcccaaccagcgcacccaacgcaagcaaagcgtccaaacggtgccaactctcggaccagcaagcttcacaggatatcattcagtctaatcaccgaacgtcagcgagccaacagcaaccaaagcatatgagaagaagtccacgccgatcttcggtccaccagctaccgctatatgcactaaggctagaccaattgtaattttccttaaattgcggtcttagggacaatcgagaagttcattttgcgtaggagccgaggcttgaagtactcgtgcgaagcagtactgtgagatactagccccgtaggatgtggagggcgagctgcgagctagcgccctgctggatgtccatcactggatcactatctagcttcctgcagaggcaaagtacaagcaagtacttcaagtacgaagtaccaaggatcagcggtacatgcatacaagaatacatggacgaagatagcagtaggttcaggcacgaggacgtctgagcaacccagttcgttaaagctcattaagaaagtctagcaatagcatcagtccgagcagcgtcgacgatccagggatcgacaccagcaagacgctcgctcgcaaattcagacatttgggtttcatattataatctccagctctacttcaatagcggctgccctctataatctatcacgatattttatatcagggtgaagggggtccaaaaattgcttgtttcgtagtgatatcgtttgggtctcgccatccaaacgggaccactagcgaaatcatactgattttctgttcggtctcgtttagatgccgtaggaccaaaacaggaccagacctgcataagacctgtttaaaaccttaccagtattttgctttgcgctgctcagtaaaactcgtggcgtaacttacgccgcgtaagtagtttatctgcattttggcaccaagatttaaaaagtttccagcgctgagagcactgtacagtcagcacttgcattgaaagtacatgcattgaaaatatgagtccgaggtcgcgatatgttgatagacatcttcttctgtgccctctttctttcggtgaccttgctgacaatttcgtcagacatactgagtataccggaggcttgggatgaaaatccagcgaagtggtgcaattaacattaaagagtgcaaaacgaagtatcgcagtggcgcgaagaacctctgaaggcgggctagaatactttacgttggcttaaaatccagcagctcaagcgtgcatcccccaacatcccccttcagttaagcgatccatccgacacttcgagtacatgtatcggtacggacgtatgccgtctaaactcaatgtcgtagaccacacgtactattttgcggcaatttctcccatatatttccgtggatccatttttcactactaattcgaatgaaaaagctacgttttcaatagtaaatggaaatgttgtgcgggtgcattgtttttgctgttatactgagcatgattccgctcgtacggcgtagagaatgtcaacttgtgctttgccaacccaattaacaccacgaaatagatagagacccgacatactcgatgctcaccaacgcaaatacttctacttgctgaggcttcaggcttcgagttcaaatcatggtctaatttgagattgcaccatggtgtactacagttggtgtacttgatgcagctaggatcggaggacatttgctaaatattagctcgtagaataaatatcaaatgtaattgctcttcagcttggtctttttaatactagttgcaaatctttagtcaaatgtacatgtagtagccacccggaataccagttaatcaactctaatttgtattgtaggaaatttccactcgtcagttgccctgaacgaacgatttttcgtttagatgtttgatgtttatttcgaactaaaaatatccattctgctgtaaagaaatctgtagtggtcacaattttttattgattcggccaggtcgagaattacgcagccatacctccatactacagagcaatgcatcaaaagatgctactctttcttccgtgacctagtttattatttgtacatgacgagtaaaaaaaacaaaaaggatgtgatcgggacgagatggtcattacgtctgcaatattggtggaacaaattcggccatcaggataagtatttgcgagcgactttcatagaaagttacggtgcaacgagcaacagcagctttacccgtcacctgggaagcaaatatgggctactgggatcagcttaaaaacgataatgtgaagccaatacgttcacaaaagtatttgtcgtgtcgcttatcttgacactagttgacgatggttttttgttggattcgcccaagagaacaacattgttggcactagctaagagaagcgagacaaccagcaacgaagcgttctcttgggcgaatccaacaaaaaaccatcgtcaactagtgtcaagataagcgacacgagaaatacttttgtgaacgtattggcttcacattatcgtttttaagcctgcgatttgtatcgcgcaatacacccgtgattttgagtgctcaagcattgcacgggagaccaaaagcacaacgtccacgtgctcattctgaactcataacttctccatgtcaacactggaaacgctagaagatgatggcagtaatttgatcgttattgacggcactagttcctaccatacatgcactggtgttgtaacaagaccgagagattggccgtggcgaaagcaggtggcactgccaccgtggcaggcaagcgaacccgactccacgtttctggtctggagacgcactgcacagctctggttgtcatctcgaagcgacaaattcattctgtatcctatcgttacatcggcagcaccgccatctcggcgggattcccgagggatcactctttaggttttgatacatttctgttttattatttgtagagtttgacaaagtctaccggaaatgtgatccaaaatttacattactgtgcatgtacagtattttgccaaaggatcctgcacattgaagttaatgcatatggtgtctagattaagaaaaatttccaatcgcgcgtcatctctcgactggtaaaaggatataggcaggctgccacgctatgtggcccaaagcagcaacaatgcatgccttgactcgcgcttagagctccaagaacccacgtagggttagttttccggggaaaaaaatcaacagtacagttcatacatcacacgatatcggcatagagatcaaccacacccgaagtctccaaacttttactgaaaattgatggcggccacaccagctggaagcctagaaaggtatctgataagcagcaagtgcctttttcccattcaacaacacgagcacagaaggtattttgggaatcggaactcttcatccgaggttagacgggctgctcaaggtcgcgagtccggaagtctctgcaagcaaagccgcctccaccctagataggaaaacattttgcacgtaccggtatccatatattggataagtactgtatgtaaggcgtatcgatgtgcggcggcacgcatctgcgtttacctacccagctggaaggggtggcatcaattgtgaaccgtgtcttggtggcaaacgccaaaacttggtgtcaacaccaagaagctttcggtggctattaataacaaatacttagtacaacagacggtctgtgcctccaagtcgatttgcaccacgcacttgcattgcttacacctgatacagatcgtcattgtagtttgtatcggagaccgtggttgcgctcgccccaaactcggggctttgcgcgggatcttcggcctcccatcgttgacgtggtgcctcaacggacccaagttggaggttgacgttgtgcggtcggcgtgttttcggtcggagggagagcaagccagacgttcgttcatcaacatgtgctccgaccttcctgctggcaatgccaggactatcaggcgcccatgccaggtgctctcgctactggtcaccttcgaagagcaaaaagtctcagttccgctttccgcttaaaagtcagcaaccatagtgccgctactggaagaaacgatgagcacgacgccacgcaagaaaatagacttgctggcgccggcgccggtcatgtcgacaacggatttcaccttttcaccgcggaaggagaacgagtggtacctcaacacgcagtcgcctcgcgagttcgaaggcggcgctcttcgtgacggtggcgaggtcaatatctggagtcgcgactacatcggactcgtggtgcaatacgccgccgtggggatgatcttcggtacattgcccggaacagtctacccgttcctgttcaactacctcaacatggaaggaacacaagtcgtgtcggctgtcgtgctgctcaacatgccgtggtcgttcaagatcttctacggcatgatcacggactgcgtgccagtgatggggtatcgccgtcgtccgttcatgatcatgggctggacgctgtgtttcgccatgcttctcgtcatggcgtgcatggatgccggtgccccgtactacccggaccacaagtacgcgcggatggacgccgacgagttgacccccgagatcgtagcgacattcaacgagtcggctcatcacgtcggcggcaaattcattgtgctcatgatgattgcagccgtcggctacgtcggtgcggacgtcgctgctgacgctatgatggtcgaagtcgcccagcgtgagcctgaggccactcgtgggtacacgcagacgacgatctacatggtccgcaccgccttcgtgaccatgtcgagcatcctcaccggtgtggtcttcaatggaaaagactacggtggcgattttagcttctcgctgagcttcccccagctcatggtcatcctcacgctgtgctgcctgcctgtgatccccctttcgtggtactgcatcaaggaggagcgtcaccccggcgtcgtgttccgcgactacttggccgagctgtggcacctcatgcagatgcgaccggtgtaccaagtcatcgtgtacaagtacctgtcgggtgtctttgagaacttcactatcacgtgttccgacccgatgcaggcgtactgggctcacgctacaccgctcaacgacaaagtaatggccatcatgggcaacgccatcttcgccatcacgctcttcttcacgggcaagtacggccttcactggaactggcgctcaatgcatgccatcaccatcatcgcagtgacagtcatggactttatcgtaactatgctcactacgtgggatatcgttcgaaaccagtggttctggcttggcgtgcctgtggttgagaacctccccaacggtatcgcgttcgtgattggaacgtacgtgatcgtggagttggctggcgagggcaacgaaggcgccgtgtacggcctggtggggtcggtcgcaaacatcgctatccctttggccagtaccctctccaagaacgtggacagctacttcgatgtgaccaacgccgacatcgtggaggacactacccacgtgcgctgggaggtgacttacgtcctcatcattcgctactctatgaacctagctgggttgatcttcctgccgctcctgccccgccaaaaggctgaaacccagcagctcaagcacaacggagggtcgagccgcctaatgggactggtgaccgccgtttacttcgggtgctcgctgtgctggaccgtcatggtcaacattatgtccatctatccgtcgacgtcgtgtcttgttatcgctggtggcaccggttgcgactcaagctcaagcggcggccgccattaaagcctgtttgtccgttgtgttgtcgctgtctaaaatcttaatgaatccaatgcggaataccggttcttaaaaactcttcatcttttggattcccacgagcggcgaattgttgctacccgtgtactgcagcaagtgaaatatgactctcggtttgagctggaattgcgtgtccagcgggcggcaacactggcttcttgccaagcgacgaggttactggcacctcaggggcagcccagttcaaccaagcttttatgacaaagatcacatgctcgcaccccacaatgaaagcgaatcgctgaaggtccgtccacgcaggcagtaactcgtctagctcgtaggtccacacgagagcgcaattgaccacaacagccaccccggcgaaactcaccagcaccttctcccagacgccgatgcctctcgcatgcattgcaattggtcgttgatatccgtggcggttcaccagcttgaggaggtccgatcggctctcgattgcattgttcagccaagcgaatgctgcggcaagggggaacactgggctgtacagagtcacgtagccaaactgcaccatgagctccttgtagtctgcaaacgtgtcacgataggtggcttgccgcttttgcatgagcactcgagctaagcgctgttcagtagcagctttcgcaacatccactcgctcacgttcctgctttgctcgaagttgaggcatggagtttttcctgcggggtcgaagactgccttcaatgtcctcactctggaggctctcgagactctgtcgacgacgtcgcttgttctccgctgtcagcacttggccaccaactgacaccgcgaggggcaatcccacctccttgaagttatcaatcaactgcgttgccactagcaaaatccataatcgctcacgaactcgatccagacgacggacgtagaaggcgagaaaccagagagacgcgttgctgttcacaagatggaaaggcattcgcttggcgaccagatgcgcttcgtgctcgtcgagagtgcggtagttttcaaattccgtgagcttccgagctaataactggtacaaattgtccataacgtagataatcactgcgttcatgacacttggcccatgcgaaaccagtccacagaccatcatatcgtcacttggcacccatttatccgcaacgtacgcccaatatccagcactcgtcgtaacctgctcttctcgcgcccacgcccggcggcagctctcactgtaactcgctcgaagacgctccgagagcacgtgaagcccgataacatagcccccgaccaagcagcacatggacaccagcaacggaacagccagaagctgtcgaagtagccgcttgtggtgtgggaagtcgaagcacctcgcgcctgtcacggggtcttgcatccactcgcctcgaaactgcagtctcgtcgtcgcgtgcacggacgacagcacgccatcgtagccccacgcgaactctacctctctctgtcgccggcgccacatgtcggcaatgagcgaggtgccgatcgccaccaagacgcagtgcaccgtgtagctgggggccagattcaacagcccgagcacgtgcaccacgaccccgtagacgctcggcagcaccagcatccgcgtgtagaacgccagccacgcgaagtacatggcgattctcggcccaaagtacgcgtagatttcctccagcgggggcagcgccaaggcgctctgcgcgccccagcgccttgtcaactggcgtctcgcttcgtctcgatgcagcgggtacagcacgacgttcgtgagtccgtcggcccgcatgacctgggacagcagcttctccctggcgctcagcagcacaggcacgcccgtcagtttgcccagttctccgtgtccgtcttcgtgcaagcagcagacgtccagctccagtctgagctcggccagtatcagtttacacagtctttggcactgcgccgcgcccctcagaggcagcacgtggctcgtgtagtccgggtgctgcgtgacccacggggccagttgcatggccactcggccggcccacgcgcctcgctccgtgacgctctggtcgggcacttcactgccgattgagagcgcgaaggcctgcgtgtcctccttggtagcggccagcacctccgagtcgggggcctgcagcctgtgaacagccacgcggcagcccgcggctctcagggcgctggccgccacttgtaccaccgcgtgggcgtcctccagcgtctgcgcgtcactcgcattgtccagttccaggtacaggcagaagtccgcccagtcgtccacgagtcgctgcgtcggggcgaagcgctgcagcttcaagtggctgccagaggctggtgcggcgacctcctccgacccgcgccggcgcttgccgctgagcgtgtgggcgcttgcactcgagttgctcgagatggctgcttggtcctcagtggtcgaaaccttcttgggcttggccaggcgctggaacgcggagcgcagtggacgcgcgagcaccaacgggcggcggcgacgcagtaaagactcggatagcaccacgcgtggctcgggcgcagccgagaggcctgcagcgcccgcggcatggcgccgccggagctccatgctgctgacttggcgagttgatgtgttacttcagaggtgtgcaacacatacatgtagccatgaggattgcctcagttttgtcggttttggtcggtataccggtctgacctattgtgaaaaccgaacactatgccctatttttttgcaaatcgatcgatttgggtgcttattaagcggctgaagctggagctgattgactaggtctagctagacgcattagactcggttaattcgtgaagtttgctgtgttcaagctggacagggggttttgcgataggtaatggggttttaatccgttgctcgcgcgctcggaacaccaaatgtgcgaatcaaattgccccgtccgaggctctgcacgacttcccatcgtttcgtgctcccaaatgtcggtcaaggttcgtggctgtgcagttgaatgccgcttcgattcgcactgaaaagctccttctttttgctgttcgtctcgatgttgctcagcccgtcgcaaagtccaagagatgtgtcctgcatgtatggcttggcccgttgccaatcgctccacccccccctcctatttcatcacaacacaagcaaccatactgccgatactcgaggaagcgatgcaggcggcgccgcgcaagacgttcgacttgctggctcccgctccgcacctcgaatcggcgttctctcctcggaaaggcagcgactggcatctcaacaccaagtcgccgcagatttacgacggtggcgcgcttcgacagggtgaggaagtgaacatttggagacgcaactacatcggactcgtggtgcagtatgcggccgttggtatgatctttggtactctccccggcacactttaccccttcctcttcaactacctcaacatggaaggcactcaggtcatgtcggccactgtgctgctcaacatgccatggtcgttcagggtatttttcggcatgctcacggactgcgtccctatcttcggcttccgacgtcgcccgttcatggtcctcggttggacgctatgtgtcgccatgttggttttcatggcctttaagaaggtcggcgctccgtacttcccagacagcaagtacgctaagatggacccgcatgacctgactccccagatgatcgcgactttcaatgagtcggcacaccacataggcggcaagtttgttgtgatgatgatgatcgccgctgtcggctacgtcttagctgatgttgctgcagacgcgatgatggtggagattgcccagcgcgaaccggacgctagacgcgggtacacgcagacaacgatctacatggtgcgaacggctttcgtaatggtttcaaacattctgacagggtttgcgtttaacggcaaggactacggaggagacttcaacttttcgctgagctttcctcagctaatgctcgtcctcagcgttctctgcttcccagtgatcccgatctcgtggttctgcatcgaggaagactctcacccaggcctgattttcggagattacctcgctgaactctggcgtctcgttcagatgcgacccatgtaccaggtcatcgcgtacaagtttctcatgggtattttcaagaatttcagcgtcacgtgcttggacccgatgcaaaggtactgggccgatgtcacacctctcaacgagaagatcatgacaattgtggggaacggagtgttcgcgatcacgttgtatcttactgggaaatatggtcttcactggaactggaggaagatgcatgcgtacacacttatctcggttgtggctatggagtttatcgtaacgatgctcacgacgtggggcgccattcgcaaccgatggttctggttaggcgtacctgccgcagagtcccttccgaatggaatcgcctttgtgatcgcaacgttcgtcacggtcgagttggccggcgaaggcaacgaaggcgccgtatacggcttggtcgggtcggtgtacaacatggcaacgcctctcgccagcacattgacgaaatatgtgaacagccactttgacgtgaccaacagcgacattctcgaggattcaaggcacgtacgatgggaggtgacgtacgtcctgttgatccggtactcggtgaacctggctgctctgtttttcctgcccttgctacctcgtcagaaggcagacacacagcagctcaagcactttggtggctcgagtcgcttcatggggatgctaacgctcacgtacttcacggctacgctgtgctggaccgttatggtgaatgtattgagcatttacccgactacttcctgtcttcgcattgcaggtggccctggatgcaacgcaagtaatgatcatcatcaccagtcatagccattaattttttaattaaggttcattttgtgtatttcctacgatggactgattcatttacagtacagtgcttacctctattctgcttctatttgctgtgcacaattggtcgatgccatcaacacacaatgattcagactgcaagatctcgctttcaacagtacgttaatcaatgactcatctgcatctgcatggctcaaacctgccttcgtctcacaagacgaccataggtttacgcgacatacatactgtgcgatccttacgggaagcaccactcattcccgcttcttacagctggaaggttggaagagctcgtatgctgagctctgtaagtgtcgatgctgcagcggggcaggcagcgtgactttgcctccagtgtatttccagggtacgcaacttgctggaggcaaagcttacagaaatcgcaggatcgcaaccacaaactcaccaagctcttcgctttcttgacagcaagcgcataccggtaccgctacatactaagtaaaagttgcgccggtacaccgaattggtaatcttgagcgggttcacgcaatacatacgcgcgccttctgtctgtagcggttgaatccagcgtgtctttccaactgagagccgggagcttgacagcatacgctagaagttggcggttgggactcgtatgtatgagcaatctcattggcgtatgtcactgtccccatcgtttcttggtcccaaatgtcggtcaagtcgtggttgaagcaggctagccttcagatggtttatggtcacaagaacttgatgccttccgccatcaaatctgaaaagtgcgcgacagggcccatgtcgacgtgtgtttatcaaaggaccattcccgaattttagttttagaccgcaaccatagtgccgatactcgaggagccaatgcgcacgacgccgcgcagaaaaatcgacttgctggcaccagctccgtcctacacgttctccccgagaaaagaaaacgaatggcatctcgataccaagtcacctcagctgtatgaaggaggcgcgctgcgtgacggcggggaggtcaatatctggagtcgagactacattggaatcgtcgcgcaatacgccgccgttggtatgatcttcgggacgctgcccggaaccgtttacccatttctcttcaactatcttaacatggaggggacgcaggtggtgtcggccacggtgttgctcaacatgccgtggtcgttcaagattttctacggcttgatcacggattgcgtccctatttggggtttccgccgtcgtccgttcatggttatcggttggacgctgtgtttcatcatgctggtcgctatggcctgcatggatgcgggcgcgccatactacccggacaacaagtacgctacgatggaggaggaagagctcacacccgagattgtcgccactttcaacgagtcagcgcaccacgtaggcgggaagttcgtcgcgatgatgatgatcgccgctgtcggctacgttggagcggatgtggcagcagacgccatgatggtggagattgctcaacgcgaaccggaggctacgcgcgggtacacgcagacgacgatctacttggtgcgcacggctttcgtgaccatgtcgagtatcatcacaggcttcgcgttcaacgggacgcactacggaggagactttgacttctcgctgagcttcccacaactgatggctatcctgagcgtgtgctgcttcccagtgatcccgctttcgtggtactgcatccgggaagagcctcacccgggcgtcattttccgggactatcttgccgagctgtggcacctcatccagctgcgccccatgtaccaggtcatcgcgtacaagtacttctccggcatctgcgagaactttaccatcacgtgcgccgacccgatgcagtcatactgggcgggggtcactcctcttaaccagaaagtcatggctatcgtcggcaacggcgtgtttgctctcgcactgtactacacaggcaagtacggcctgcgctggaactggcggacaatgcacaccattgcgctcacttccgttacgatcatggacttcgcagtgaccatgcttacgacctgggatgttattcgtaatcagtggttctggctgggcgtgcccgtagcagaagcgcttcccaacggtatctccttcgtcatcgccactttcgtcatggtggagttggctggagaaggcaacgaaggcgcagtgtacggtctggtcgggtcgatctccaacatcgccatccctcttgccagcacattcaccaagaacgtcaacagccacttcgatgtgaccaatgccgacatcgtcgaagactcgcaccatgtccgctgggaggtgacgtacgtcctcttgatccggtactcattgaatctggcggggctgctcttcttgccgctgctgccgcgtcagaaagcggagacacagcagctcaaactgaacggtggatccagtcgagcttttggtatcgtgactctcctgtacttcgcactctcgttgtgctggacggtcatggtaaacgtcatgagtgtttacccgaccacttcgtgcctgccgattggagggggtcctggatgtgatggcggtagcagcgatatacattagagtttttttttttagtattagagaatatttgtagcttgtgcgatcatgcgcttcattctcttccactacacggatttcatttaccggtaatagtacgtcacgaaggaggcagaggcagcaaagtttgccatccgttgctagacggtatggctcccacagcctggcacgaagtggttgagctgtatatatactgcaaaggactgatagctctccagatgatgctcctcatggcgaaaacagctatcagactggatggccatttttgagacggcccagtgctgcacttccacccttaacgcctccagtgcatcgtgcactccgcctcgatctcccgcggatacgtctctcttcccaacgcaaaatgcagcaacagtcaagtgacggtgttgagtgccacttgcagcacacgatgccaatcgagctttgggacgaacacttgatcccgttcctgacactgaacgaagcggtggcgctggcagaggtgagccgcttcttctacgacgtcatccacgagcacattcagctacgggcagaggcgtcattggtctgctcagtgacggagctgctgcacgtcctgagcaagtggaaaaacctccgcaacgtagccttccaacccgtcggcggtgatccagagagcgacaaagcgccggaaaatattcactacaacgtgaatgcttcgggaggtctcatcgtcgatcttgatcgcagccaaccagcaccggaacccgaaccagctcaagcgaccagcgagagctacactgacgaagacggtgtgagcgttccaatgcggtacagctgccccaatgtgctgcaagactgtatcgggagtggccatgatggtcaagtgaaggggctgaacttgtccggaatcgtgcgcgtgagcttgttcgacggcgtgaaccgcttgcaggagctgggactgagtggctgcagccagatcgacggtttgcactggctaaacggcattcgggaggtggacctgagctactgcaacttcctggaggacgtgtcgttcctcagccgctcacagcacgtcgacttgtcctactgccacgccgtcacggatctttcgccattggctaggtgcgagtcagtgcagctcaacgtgtgtcggggtatcagcgacgtcagctcgttaagccgcgtacgtcgcgtgagcctgcggaattgtccggaggtgaccgatgtgagtgcactaggcaacgtacacgagctgaacttgggtggctgcgcgaacgtggcgaacgtaagcgcgttgggcaacgtgcacgagttaaacctctcgggctgtatcaatgtcaccgacgtcagtgctctcggcaaagtgcacacgctcaagctgcgcaaatgtctgggggtcgtggatgtttcggcacttggcggcgtacaggacttggacctcactggatgcatcaacgtcacagacgtgagcgctcttggacgtgtccccaagctccagctcgcgctctgcagacacattagcgacatctcggcactgggcgatggagtgcaggagctctcccttcggcaatgcgatgccgtcaccgatctgtcagctctgactaaaagctcgagtcttcgcgacctggacctctcaggttgcacggcgttcacaagctccgagctgcagcatctgcctccacttgatcgccttgtgctctcgaggtgcagccaattaaggagtcttgaaggtctgacccgcgttcgagagctcgacgtgagcttctgcaagaacctgcggtcgctggggtcgtcactgcgcgaggttcacacgatcgtcacctaccgctgcgagaagctcgaggacatccaagtgctggccaagtcggccaagcacctagcgaaggtgaacttgtccgggtgctctcgcatcagcgacgtcagctttatctcgggggcgcaggatgtcgacttgcggttctgcgacgcactcgaggacgcccgtccgctggctgaaagcgcgcgcatcttgaagctcgccgggtgctcgaagctcgtggacgtgtctccgctcgcacgcgctcgagagctggatctaagctactgcccacgtatcgaggacgtgtcagcgctggaagcggtccacacgctgtcgctacgccactgcccgagcatccgagacgtctctgcgctgtccagagtgcacacgctcaacctctcgggctgcgtgcagcttgaggacgtgtcggctctgcgagatgtgcacgagctcaatctgtcggactgctgcaaggtgacggacgtcggcatgctcacgggcgtgcgcgtgctggacttgcgctacaacaagagcaacgcggatgctataaaggccggggtctcgaaactgcgcggtcttgtgcccatcatccgcatgtagagctgctcatccagtaaagcttggatctaacgcgtagatgaagcactcaccatccattctcatccgatgtcctcgtgtttgcgcatagacgacctcggaattcccgcgttgccgatggctcgcgcggcatcgggggcgccacgcggcatcaggctgtgcatgtagaccaactcgttcagcggattcacctctccgtgtattagaataattatccctcatctttacatcgctctgctcgctgcgcgaggcggtctctgctgcttccttccagctaggctaggcgccgtgacgtcgggtgcagggggcgccttcatagggcatcgatgcaggtctaccggtacatactctcgtctgaggcacgacttagccaaagcgctggttctgggagacctccggctggaaaccctcctgcaggaagtacttctccacagcgtccgcgacgccgcggccctcgttgatggcccacaccaccagagactggccacgacggcaatcaccagcggcgaagacgccctccaccgacgtctggtagtcgccgtaggcagcgcggatgttgcggcgctggtccacttcgagacccagagactccgcgatcttctgctcggggtgcacgaagcccatggcgaacagcaccaggtcgcacgggatctcctcctccgtgttggggatctcggtgatgaagttggtcttggggtccttctcgcccatgaccgtgaccacgtgcgtgatctcgtccttgtcgttgcccttgaacgccttcgtgacgcgcgcgtacttgcgcgggtcctcgccgaacacggagcgcacctcggcgtggccgtagtcgacgccgtagatgcgcgggtactcgggccacgggttgtgcggcgcgcgctgagccgggggctgcgggttgtgctccaggttcacgaccgacttgcagcgctggcgcatggacgtagcgatgcagtccgtgcccgtgtcaccgccgccgatgaccacgacgtccctgccctcggccgtgacgaagttgcggtcccagccgctctggagcttgccgtccaccgtcagcaggaggcgcttctggttcttggtgaggaactccatggcaaagtggacgcccttgaggtggcggccggggatgtccacgtcgcgcgggacggtggagcccagagccaggacgacggcgtcgttctcggcctggagcttctccacgggcatggagacgccgatctcggcgttcgtgacgaactcgatgccctcctcgcgcagcaggtccacgcggcggttcaccgtcttcttctccagcttcatgttggggatgccgtacatgagcaggccgccgatgcggtcctcacgctcgtacaccgtcacgtggtagcccttctggttgagctggtcggcggtggcgaggccggcggggcccgagcccacgacggccacacgcaggccgttgcggcgcgggatgcggggcacgatccagccctcctcgaaggcgcggtccacgatggcgtactcggtgttcttgatggtgatggggtcgtccacgaggccggcgacgcacgcggcttcgcagggcgcggggcacacgcggcccgtgaactcggggaagttgttggtcttgtgcaggcggtcgatggcctccttccactcgtcgcggtacacgagctcgttccactcggggatgaggttgttcacggggcagcccgtgttggtctggcagaagggcgtgccgcagtccatgcagcgcgcggcctggatcttgcgctcggtggggtcgcgcgtgcccgagttgatctcgttccagtcgtgcacgcgctcgctcacgtcgcggtacgggtccgcctggcgcttgaagtcgatgaacgcgcgcgcgctgttgatctcgcccttggagccgtcgcgcttctcgaacacgggctcgggcgccgccgccttggcggacgccgcgcggcgcagcagcgagcccgagcgggcggcggagcgggaggtcaggcgctggcgcacgacggactgcatatgatcacaagatacgaaggagaggagggcggggctggaggtttcttgggcggcggcgagtgcgcgcgagcgagcagtttgcagaatgacagaggctgaagcgaagcggagggtgagacccgaagtgaatgctcattcccgttggtgttaaagcggttcaggattgcctgcctaactcgactataagtttgcacaagttatcgtataaagaggatgttttactatagtttgaacgtgaatcgtttaacgagaagccgaggctggttatctgaattcacgggtgatggtaaggaggtccgaattagaaaagtatccgggtgcttaaaaaaacgtccccagagcctaaatcggtccccaaacttcggtcacgtcttgtctttgtgcgccggatgcaccggttctgatcttcctgcggtgttattatgtccagcggactttagcttttgggaggaagggtgtggaccgtcggaataggataccacggcgctggcgaagcagcgagtgcaatcgtggcccaccagcatacgcataacgatcgaacgcgtagatgagaatagtcgagtgcgctttcagcgttgccacaccagcttttcttcgtacgacactgtcagttgcacgtgacccgctcaatcgcgtgcccacgtgacgttatgcgcttgtacggggtttcaattgaaagaggtgggaggggatggacgacgcttcgagaatgggcaaacaatggctactgcctacatctttgaccccgaatgcacgcgctctgatccgagctcgtaccgatgtggaggcgaggtgcttgtctttcttggcaacgcaatacgcagcgctttcggtctccgcgtgctgggttatagtggcgttttgcggtgtttatctgcgagcgcagttcttgtgacttagtgtaagatctaccaaggccagcatcacagttcactcgttaactcgtggcaataataatggtgtatccgatccaagtcatggctacatcccaaggtctcagatgctgcaaaagctgtggtcattttcgcttggcccacagcatgcacagtacactttccagaccaattcagtgtcaagcacttgactcccagcaacgccgccctcctctgcatcggtgcgccgcagtgagcgcagccgagggcgcccgcaggcagagatggtgcgcaacttgcgcaccgtagacgtggcaaaagtatctgctcgaaaaggcaaccttgaagttgaagtggaggcgtacggcgtcgttgctcgtgtcaaatcgagcccttgcagccctcgatgccccgtgcagccaatcgccttccccgcttgctccaattcgaccgctgcaacgcgcagctggctcatcgaaatggctcgtcacggtccggccgcggcccgaactgcaaggggccttcaagccggcctgtgtacgaccagagcgattcctgcttcgtcgcgtgcggctcttggttgcagttggtcggtcagcgattgtgaaaaacaatagacggggggctggagcttgaacttggctccccctgcttgaacatcgcaccggaaatccgctcggctgggccagtcgtgcgctcgagcggcgtctggttggcccgcagctccgtacgtctcgcagccttgcaggatcgagccgcttgaagattcaagcaagcgccttcggcgtcggggcgaccggccgctccgcgcttgtcgtgttggctgcctcgtcgcgtttggacgttaaacgtgtttgaagctgcaactgcaacgatagacgcgccaggatgtgatggttgcagttgcagtcctcaccaccaggaggaatcgagtgctatcagtggacagccacgcgtttggccttgagcgcttgtacgccccggcctcaaattttctcggcccgttgtgtttcgccagcccaatgcagacctctcggacacttttcattaagctgctcaacgaatattcgctttaacttgagcaacaattgatgctacagcactccaggactctgaacagttggcagtcgtctaacaaggtagtacttctatgtattgggccacaacccttgcatgaagacctagcattcatggtttggatgtctgcgaaaggctctttcgaccggttttccctgcgtcaattgtttcacctacttcacccgcgggaccagcggaagggaagaccagaataacgcgaaatctgtgacttcatgtttccatttcgatgtgcaatgctggtgttgggcgaacagcgatgaagaccccattgaatcatctcaaacgaagcgctcgagctttcattttgcagcgagatactttgcgtacggcttgagagggaccaataggctatcgacttcgcaacgaaatgcgttggattgagtgccgaaccgcgatggtaggacggtttgatgcatttgtcctcaatgtcggtgcatcttgctgataaatcgtttcgagcatgtactaagttgaacaaggttaacgaaaaagtttcattaaggttaatatctataccctacgttcgacgagtctgtgttgcagttctgctacaacctaccgcctcgggttcatcatcatgttggcgttctggttggtcaagttgtacgcctgctccgccttcatctgcagctccagcaattgattgtatagtccttcgcgagtagtcggcgcacgctggtgtgccatcgggggatagcttgggttggtgttcgccttcatgcgctgacgcatgaggaattgctgctgctggatctgttgctgctcgtactgacgctgctgctcgctctggtaagtcgtaagagcctggctggtttccatcactgctggcatcctttgatcaagcggaatcataccggagctgggtccatttgagtgctggaagctttcgtcgatgtccgagtgcagtgacgaaatggagctggactgccacgactggtaggacgacgagaactccgagtccgtcagcgacagggtcgacaccgacgcgttgatcatgtccatcctgacgctgttactgctactgctgtcgttcctgctgcggatgtcctcgcgaggcaccttcctcggcttagctggctgctgctcaagcggctcaccagcgaatggggactgatccttgaccatgaccacgcacatcttgcagcaagaaaccttgattttgcctcggcgcgagaacgtcacctttcggatacgacacctgctgcagatgacagcgccgcacgtctggcagttggagtgggacgacaacaggcccgccttggcacgacaaattgagcagtggttaccactctggttcttgctgcttgcgccacgcaaggcgccggactgcttggcgaccatggcggaaatcttcttcgcttcagctccgaccaacgccgtcggaaggttgaacagcatttccatcgagctgcggtagtcgcccactccaccggccgtgagcacgtcgcccgacgaatcgtacgcccccatcatgaacacttcgacttggtccgcgagttttcccgggcggaagatgtagcagaaggaaatgttggtacgcacgatcgagttgtcatcgaactgcgggcagttgcggactggtactgactcgagcacctgatagccgaagcgatggccgttggcgtcctcggatacaccgacgtactccatgtagcagcagtcgcggttgccacccacggtacgcgacagcttccacttaagtcccagatacgacgagcgagtctgtcgaactgtgtgtagcaccgcacagtcgatgatcgagtcatcgcccagaaacgcagccagtgtcttcatctcgtccgtcgaggactggtacagcccgtagaccaggtcatccactgatccacccacgattccgtagcccatgaccgctggtttgatgcttttgcgactcggttcgccgtcgtcggacgatcgcgtggacgtcgacatcttgcctgcgtcgtcgtacccggagtgactgtgcgagctcagcgacggacgcgaccgggccgagtaggtgaacgagtcgctgttcgatcgtgtggcggtcgcatcgccgcccgctttgtcatacagaccgagttgatgcgcggagccttgagtgctgcttcgtcggtagcactgcagtcggtccttggacttggcgagcttccacgtgtgagcgtcgatgaggttgcgtccgtccttgacgtagtggtcgaagtcccggttcgtctctcggacgatgtcggtcgctagtgaccggtagctctgcgcctcggccggcagcagctcgaacttggcgaagtagccctcgggcagtgggaatcggagctgcatgagtaaggtcgcttcaaaattagctataaggtttggacgaggacggtctccgataatgggcacgaacgtctccggtaacgtcggaggttcgtcaagttaatccctcgctcacgtctgcggagcaggtcgagtcaaacgggaagtggtgagtgcgcgacaagagcgccagtagctgcgaagagggagaggcgaggccacttgaggacgacgtacctgactccaggcacagctggtaagctaaccgtggcgccccctctccagcctggagtccaggctgcagtccagctgatggcgcgcggtgtaaaaagctggcgaggggcagatgaatccgcttgctggcctccgcagagccaccgttggcgctctctccactcgcagtcgccgagtccgaggcaaaaatgagctcaagaaaccgcgcggattgccaccacgcccgcgcttgctgacgccgacgggatcccgtcgcgcgtgcgaaaaaccggtcgccaacttcattccgctctgttgaggtggaacgcggatttgcatcgacaaggctactttgagagcgggtgcatgcatgcaggcaattgtgtctagctgccgctgctcacaggcgagcacgcaggctcatttgccgcccctcaaaatccattgcactatcccttctgagtctgtgcgtgtaggttgagcaattggctgcgctagtgttgatcgagcggtgcgcttgcacacgtactcattgtatgagcaacaagtacattgaattgagcagcagacaagatgaaactgacacctactcgtacccaggttaccatcggtacatatcggtaccaattggggcgtcacacaaatggaacgtttgaaatgctacaatacagccttggtatgtcttcttgctataccagatctaacagctacatgtatcggctgcttggggtgcccgcaatacacggcaagtcatcaacaatagccacacggcgaaggtggccggtatcatcgcgtggagaatatatatttcgtgctcgacactccataatatgctttcggtggaggcgaaggcgacggtctccgctcccgttcgatcttcgtcttcaatttggtcccgtcgtgacaaaaaactgatgccaccgcgactggacgaacgacgcggacagcactcggcattcgcgatgtgtctttcaatctgcgacaactttcgctgctgggtgcaccaacaagttgctggcagcaaccggaggcgccaggtagcgacaggaagtggagcattcgtgcgagtcagccgcgcttaccgctcctgcatctgctgcaagcctgcgggcaccagtttgcgattgtaatcaaaccagctcggccccggttgcacctgtacgttgaagcctcgacctggttgccatctgcgattgacttcttttttcaatcaagaggcttccgctttcatactgtagcgctttgcctgtggttcctgtcgtgcgagaacaccgtcgcgacaagcgagcttcagtgtgtacgggcagtgagttacaccgccacccactcggtgaccgagtggtgattgccagaaattggtgcaccatctggatccgacacaacatgcactaccaactgtacggtgcacactgcgcaggccgcgcatcgagccgcgcgctgttgtggtggtcttgataaggaaacaccagtccacacttcatgtgcgaagccgatttgaaggaggtcgttcagcgagatgataccgtacgcgcgtctgggtggaatgtgcgcttcatgaagctgtacatgtacagagaagtacatacgtctgatacgcttacctagcgaattgagaatagactacgtactacatgtacgctagtattatgggcttcacgggctctagatttaacaatcacagcgcgaactctacatggtaagagcctcagctgtacgaattctatggctcattctgacatgggagtaaagtcgagcaacctgggatccgagtaggacagcgtaatcttgttggaggaggagaggggaggctgtggggcgtgcagttaccgtcggatgccagctacatgtatttcaacaaaactacattggatctgaagctcaagcggtggatcggaaacgatatcatgtgagctcaagtttattatgcagttcgcattcgcagtcaaggtcgacatcgagctgtgatggcacagcttttactactacagaaggagaaaccccttggcgaaggtagccccaccggcatcaagtatccaaggcggcactaacgcgggctaaattaatgcgtaaataattgcaacaacaatacaatattttttattcctggataaaaactgaattgataacttatttcaatgcttgattccttgacgtactcgcccgaatataagcccgaatatagccccatcccgaatataagcctgtcgcaagaaataccggtacttaacggtttgaacatacaaactccaacataaacgtttttagcgctgacaaatactctgataatttcaagcttctgctataaaataaagtccggactttaatagggcgagtacgttaatttgtttcccggtaaaataacttaagttattttatttattaaaatacccgaacactcttcaacttgcttgatgagcaagcttaggtccatgatcgagatccatcctgtccttttcgtactatggacgctgtcagtgactgcacaaatgagcttcctacccctaggaacttttcaatttgttagggcgatggttctcgacgccgacctccagactttttcttccgggcaccgtcttcgtcgttctcctgatctttacctccttcgcctttgcgtgcaggatcgaaaaagctggaagcacctgacggaggcgctacttgcgtacacgccgattgacggactctgttcgagagcagagagagaattagagagatgagagataacccgacgcatgcggaagttgacccaccacggtggtaagacggttcgtagcgcgttcacaatacaaatacttagcaccatcgtattagcattgtttggttcttcaagctatgcttcctggttaagttaacttaaagaagacgaatctcaaatttcgcacgtggcaaagtgctcctcagtgccagtaagggtatacattgccttgaaacccttttcgtacactgggtgcactcgattttgttgacattgctaatttcttacgtcattcgatatgttcggtggagtgtgttaaacttgacagtggttcaaccgactattcctttggtcttccataccgtcaaaattccaacggggttggactgcttccaaccaaaatcggtctagcaacggtattaggttttttgttcagctgatatttaacctcacggccgcctattggattctcggccaacagtccagaagcttccaggttagtgcagcgagtcgtgcaacgctgcttgtgctacctgtgctgactgtgctgctgttgtctctgcgtgtacacaggcgctgctggccgctgggccgtgtgtgctgctgtgacgcgtgtactgcagtgccgcctgtgctgctgggccctgtgtgctgctgtgccgcgtgtgctgcagtgccgcctgtgctgcagtgccgcctgtgctgctgggccgtgtgtgctgctgggccgtgtgtgctactgacgccggaccacttgctgctgggctatgtgcgctgctgggacgtgtattgggttgcgcctgtgcgctctcgtggtgtgtggctcaagtggccgagggtttggacgagtatggtgctgttgatggatgcgacttacccgcgcccatggagctcatgaggttgagcgccaggccttcgggcctggaggatcgggttcaatccccgacaagggcataaagtattatgtgtttttgcttttgttttggacaggtcagctaagagagtgcgtgctactcctgttgtacgtattgtgtatcttattgactgtttagtgtgctgcgtgtgcatttaggtgaagcgcaggaatggcggaagggcggaattgggtgtcaggtcgacgacttcgccttcatagtagcgctcgcgaaactggtcaaggaggacggaaaggtggcctgctttgtgaagcgcacgcatggctttgacgaccgagccaacggctacagcctgtgagccttgtgcacccaagtattcaagcgtcttcttctcggcttcgactcccacagcgtggacctccgccttgtacgctggcgaggccgggtgcagcttgaacccagaaggtaagcagagcaccatgaatgcaactgcgtgtcgtgactcgtgaaggatgtctttgctaactgttgttgattcgtacatgcgtggtacagcagtgaaccactgtcgatagcgctttggaggcacgtttgcgcgcgcgctttggctgcgactgctcaacgtcttcgtgctgctgctcggtagtgtttgttttcttgtcaatagattctgcgttcgctcccaaacagccagtctttcctctacgcgtgtttggcggagcaatagctcgtcgagctgctgcgacagcttttcgagaatacggaacatgttttgagaggactcggccactgtttcttgtttctcttctgccggtggattgaatgcagctcggagggtgatcgaccatgccaacagctcggaggcttgtatgttgaggacaccaagggcttcatgaatgcgacggacgtacgggctatccaagcgatggcggtccatctcggggaagtgaaggatcaaggtcgccatcaacacttcgagcacctgaggatccaagttccaagacactgtcgggaaccagtgacagcagcgaagaggagatcctgcagcttctccacgcgcgctcggacaactccgtccagggcggtaaggtctggaagtcgggcgcctgcttgcgggttccacccgctcaattggcgcgcaacttgttgatcttcatgtgttgtgttcagcatgtaggaaaacgccttgctcacgcgcgacatattccagcccccgtgttcaacaacccagttcgggctaatgcgactgtcggcgttggcgtgcatgaccccacctcttctgaaggagtgcgaggtaagtcccttcgtgagtccactctcctttgctgctggcagcccactaaccgtgactaatagtctattcatataagcttgggcaccaggggccgagttggctcgacatggctgtggagtcttgcatgtaggtgcttccgcaagctcgcggtctagctgcgcaatcagcctcagctcgccatcgtcgtcttggtcgtcggacgcggacagcgcaggtacggcagcaaattgcgagaagatgcgagttcctggagcgggttgacgggcgagagcgacagctagcacgtgtaacgggcacgtgaagggatcgttaggatccttaaacagggagattccctgttgcgaagcagtcttcacacgcttaaagcggagaaatatcataccgcctagcatatacgcacagaattgtcagcataaatcgtggggttaattaatacaaaattcaaaatcctgcacgattcgtaccggggtatacacacaacggggctttctccaattgctcagcctcagaaccacgaccgtagaggtaccacatcaacgccactagcgccgcatccaggtagtcggagttggcggaagcgtgcatgtagagagccgagatgatagtctttatatctttcttagtacatggtggcgcttgtttcgtgacaccttgctcaggcctcttttcacagtaccgatctagagttgatagcatcttttgcagcttcttagctacatattggccctgtcgtgggtacagatccgccagccagttcttaacattgccaaaataagatagcacagtgttcttggacagagctactccttgccttccaacttttttcactaagaaccacgcatacttatccagaatgacaaacaaactcttacctgtgctgtccttagaaatacgatcatgcacttctgtgagcgtcacctccttcttcgcaaggaagtcttcgaaggacttcacagccgcgtctctggttgttcgcaggaactagcgataccaccgacatgcctgtgtgcgtcggaacgcagaatggagtcggagatgagctggcaggggttggaaacctatgaatatttattctatttgtagttcacttgatatttgtatggcatactcgatatcaaatcgcgtttccaaccagatatcgttggaatgctcagatcagcggttgacagtcattccctcgatttttttaattggtcgaaattttaagcaacggtagtgtctattggttgtaaatgctaagaatcgcagacgacacactcctattggccggaagcaccatacaaactttaaggtatttttcaggggttagaattgcagcgatatgctaccataccatgacggtgccgacagcggtcgacagtggccgacagcgtcgtgattggtagaaataagcatttagttgagcggttaatctattggtcaaatcatttgactcaaatgtcaattccaaaatgcaaggcaaggacggcgggtgggaggagcggggatggaggagcgcggcgtcatcaaggagggcggcgagccgaaggacgtcggcgaaaaagggggggggggggggctgcatagttccgcctgccaagatgtgggtggtgtctgggaggacggcggtaggctgcacgacggcgggcgagtggtccacggtggaggctaggaagatggcgcgcagcacgacgatgacggttacctgaagcagggcggtgggcaccaggatggcggcgcaggacaagacggccgcgccgtggaggatagacggcgggaaggaggaggaggagaaccggagcgaacggcaagaggcggcggaccggaggtggggcgatggggaggccaaggcgagggcggtaaaggcatcaagcggagggaaacgagcgcaagggcgcagcgagctgctgggaggcgacgagcatagggaagcgtgcagcaggaggagggcgtggctgctgtggcttgcgtactggtgttggcaccaacaacacgacgctggtggggtgctgctgctgctgtgtggactggcactgttggtggggtatcgctgcaggtggaatgctccgcagtcacacaccacccctagcgtctagtactcttgagtaggaataagttattgatattaaatggaataaattaatggttttcttgtatattctgcattggatcctagcgcttcgctcgtgcggtatgcagcaagctccgcctgagcgacactcctgaatgagcagctctcactgagtgctgcttgttcatgttatgggtaggtcgataggcgtgcccaggaaactcgtttgagttcgtgataatggttgaaacgctattgcaaacggctcaaatcagctcgtcaaaggcaatacaagagctaagtaacttgtcggcagcagaacagatatgtatattatatccttattacttagatttcctatgggatgaatacatatttcggccgcgttgccggcattatacgtcggcatagtgtcagcagcaaatatacctacccctaatcatgttgattggcctaaatagggatctaccggatgcttattcgctgaaaaaacgtattggacatctgattgggccatggccgccatacagtggccaagtcaagttcttgtatgtcggcaccgtcacgatattcatccttatagcagggttgatatgcttatcataatcacatcaaacccttgttgaaggtgaagctgtgtccgtagccacgaaagctagatttgacttgattacagcacgtatattacattgaaatacgcccaacgttggacttcttacttcatctcggcggccgcgctttgctttttcatattgatcttctccatactcgtgaacctcaccagtcctcccgatccgcttttctctcgagctgcaagaaagcgcgagatacgctgcgccgtcaactgcgacggatactcgaccagccagtagctaacagtagctagtgcaatggtgaggaacagccgagcgaacaagcggttgaagtagttggactggtggctgatcggcgggtacttgacgacgaaagtgtgcagcaggtagatggagaagctgatcttgccccaatatcgaaacacactccactcgaacattgtggagacgcaggacggctgcatcacctcgatcacgataatcgccgtcatatacacgccgacgaaggggaagccactcggaggaggcgcagggttcttcatgacccagtcgaagagcaagccgcggaagatcacgctcatcatcaaggcgattatcagaccttccgccgctcgcaggagtacaaggtgccacaatcggaacttgaagcccgtctctttgatccacaagtcgaacttcacaaacaccacggcacccagagaaccgaggacgaaggtgtgaaggtggtggttgagcgactcgtggctgttgcgaataatggtccagccctggtacacggtccacatgaagagaggggtcgccgctacccaccagaagcgccgcaacttgagcatcgtcaacacgaacagcgggatgacgaagtagtacgagatctccaacggcagcgtccagaagacgtgatagcgctggtcgaactcgaacgtgagcatcttgttcaggttcacctcgccagccttttgcacgatgaagtagcggtgctggttctcgaacgacagccgcgacagcacaaacgctgtgatggcgaacagcgggtacacgcggaagaaccgcttctggaagtagtcgcccagggcgaacgcccacgcacgcgcgccagcaccttgagccagcagcttcatgctcttcttcatgaatagccacgtcagcaggaacgacgacaggatgaagaacgcgtcgaccgcaaccgagccgaggtggagatccggaaagaactcgcgagagtgctggaccacgaccatcatggctgcgaggccgcgaattccatcgaggaacaggatcttggtggcgggagcctgcggtggcggcgggttcgcggcagcggggacctgttcagccgacgacttggtgctgctcgcattggtctgtcctacgaaagtctggtcctccgcgtccgacgaggacgccgaggtctcttcgtccgatagatcgatcacgctgagcttcacggttcctgcgggggtgtccgcattgacggccttctcgtcccgcccgctgggcgtggcattgcgcgcgtcctgcagcatctcgactgacgcggcgattgcaaagtgagactttgagctgccctcccacatccggcgccacgaaatcctgggatctgactttcccgaacagcgggtggattaaccccatgtggtcgcgcggagttgtggacgcgccgtgcaaagcacgcgatgcttgttccagttgctgtgttgttgagtctgcttgagtcatgggcgagcagcgctcgcctcagcccttgactaccggtagatccattaaggcacgtgagtttcaaagaactttaagatcgatagcgcaccactgcagtttgtggtcttgaggcgagcgcctacaggtgagtctactaactagccaaagtgtattaacgataattaatgagactgcgtgttccggttcattacttcatttccacgccagctctccgttttcgcatggcgatccgctccatgcaagtgaacctcacgagtccacgctcaccgggttgtttggcccctcgagcggcgagaaagcgagatatccgctgggccagcagctgggacgggcgctccaccacgtggtaggaggccgtcgccaacagcaaaatcaggaacacgcgcgcgaacaagcggttgaagtacttgggctgcgcgctgatcgtcgggttccagatcacgaacgagtgcagcaagtagaccgagaagctgatcttgccccagtagcgcagcacgctccactcgaacatggctgacacgcacgacgggcggagcatctcgatcacgaaaattgtcgtcagcagagcgctaacgaacgggaaccctttagctgtcggcacagggttggcgtgcacccagtcgaagaacagtccgatgaagcagacgctcagcagcacagcaatgaccacaccttcaacagctcgaaggagcagcgtatgccaccaacggaactcaaccccagtccttttaacccacaagtccagtttcacgaacaccacagcggccagcgagccagccaggaacgtcgggatgtgaggcctgagaggcatgtggctggtccggtactcgtagatgccttcgtacacgacccacacggccagcggagccaccgccacccaccagaagcgattcatcttcagaatcgccagcacaaacactggaatcacaaagtagtaggcaatctccaggggcagcgtccacagcacgaactgtcggtggttgaactcgaatgtgaggacttggtccagagcaaactcgcccgggtatttgaccagaaagtagcgatgctggtcttcaaacggcaagcgagacacaaccatcgccgtgagggcaaacaacgggtacacgcggaagaagcgcttctggaagtagtccactaacgcaaacgcccacgagcgcacacctgcgccttgagccagcagcttcatgctcttcttcatgaagagccacgtgagtaggaaggacgacagcacgaagaacgcgtccactgccacagcaccgagattaagactctgcatgtactctttcgagtgctgcgtgaccacgaggatagctgcaagaccgcggactccatcgaggaacagaacctttgtagggggtgtgacagcaggcttagcctccggaagcttttccactgaagacttggtccgatctacgtatgtctggtcctccgaatcggacgacgccgtcgaagtgtcggaatccgatgcctcgagcacgcgtagctgcacctcctcgccagccggagtctctgaatcctggagctgcaaggcctcagccgttggcgtgttgctcctcgacatcctaccgttcgcttggcagactgcggcgcctgttgggaagtgaggcggagcgacagatcgcgctgaatggacgcccatgactgtcaatgggcacgaacgcacgaacagcgagcttggtgtcgatcacggtcgcgcagcatggaaattttgaggcagcgggttcggtgataggcgaacgcgatctggccgcgaggatagccatgctggctgggcgaacgcctcgtcaatacgcatggcttcgttcacgggcttcactgtgaagttcactgacacagtgagagccatttcgcagcgcgaattattccatggtagaaccagggaattgtgttttccacttcaaaatagtactttcgatataccggtacaaaccggtattataccggtaaccctgaccgcccacagtccaaccgatggacgcgtggcgttctcccctcacttcgaatcaagaccaacaaacaagcaagcaagacccgcctctcctcgtcccttatcggactgagctgatggtcatcgcataagctcccattaatgaaacttcgtttgcccccaatgtagtggaatcgattattactgtataacgatgggctcgatgacgagaccaatctgtaaagatgcccactccgcaagtgcagcgtaatctaggatagcgttggcaccaccggaggacgacaacagctcaaccggcaagctcggcgccacaagttacttatgacatgctacatacacaagtgtacatgtagcacacacaagcttctaggctgctccatgtttcagcggtttataaatccacccaatctcctctctttctctctcaatctccttggtgcggcaccaagtcgtgccagtccggtagctgccacttgttgaagcggtcgaggtcctctttgtcgaacatgccgttgatggcgatgcccagcagcttgccgacctcctcgttgcccttctgcgagaagtgcagcccgtcgacgaagtacgtcttgcggacactctcatcggggaacgtcgtgttgaagtacgtatgcaggtccagcacgtgcacgttctcggccttggccagctcgacgcacgtcttggcgtacgaggcggccgacgcgttgctgcggtccccgtggcgcgccgagtcgatgacgcagggcggtgtgatgagtagcacctggccatgcggggccagcagcggccgcaccgtgtgcaggatgcgctgcagattggcgcggtagtcctgcagcgacacgaactgcgccttgtcgggcccgtgctccagcacggcgtcgttggcgcccaggaagacggccacgaaggacgccatgtactcggtctgcagctccttctcgtagataggcatggcatgctgtagcacccacctgaaaagggaaataaataaacggtaaagtattagtgaagtattagcagcgatgaagtgcaggacctacttggagttgtagcccgagaggccgcggttgacgcagtccacggagcgcacgaagtggttctgcacgatcgtgatgaagccgtgcttgcccgggtcgctgccgtgctccgtgatggagtcgccgatgaagtagaagaccgggcggcgctcggccgacagcgtgaggcccatggcggcgttgagatcttctcgcaactgattcccagggggcacttcaagcaggatcggccgttggtccacacaatctattgtgcctttcacgtattttggcgggtgagctgttaattcaggcggaattagagtcataaaagggcgattaacgcttatttagtgctaattctgcctaagattgtgagcgcttcccctaacacccgcgatcagcatttgagagccaatcggcggagatattaatacgagcagaatggcatggattggcgggtacatgtaggaagccgccaatcgctctgttttcgcctaacgcaggctggattagcttattccaccttaactcggcctcaccatcgccgctcccaattcgaccacggagggacgacccggaattaagatgggaattagctggcatctgttgccgtattccgtacaagaggttcaacatgcgttgtgacaggactgaatctttgaacgctggcgtcagtccgtgctccgtcccggaatagtggtgaaaacccatcaaccatccgacccgcctgaattttttatcgtacactcgcgccattttctgttcgataaaaaatttctttggaaaaatcagcttttgttttcaaaagtttggtttagattgcacatagcgatttggaacggagcgctgtaagttgaagtgctccgttccctttcgcccctctcgccttgtgggtatcgacaactgcattgatggaggcgcgccacaaaagaagatgccgtctaaaggaaaagcgcgcgcgagcacggcgacgaccaaggaggtggaggaggagcaggaagagaaggtcggtcatgtggggcgccggccccacatgaccgacgaggacgtccaaggcgtgctggtcgctgcccaggtcttcgtgtatccacctgacggcaagaagaaggagacggccggccagatcgacgtccccaacattgcagatctctacgatcgctgctccgctactatccgaaagattatcgaccggaagccaaggatcggcagcggtcgagtgcccattcacgaccctgccgtcctggcgcagcgattgcgctcgctgccgccgaacttgagcgcgaggcaaaaggcaaggcgcgcgggcgtggcaccaagcacactagcacggctgcgcgattccatcgagcagaagctcgctgaggcgactacggtccgtttcgaggctgccaaccggagcgtgcggattgagatgttgcagcagctttgtcgtgacgacgtgacagaggtgtggatggcgtattacgctgtcaccgactgtggattcgtagatgtgtggctcgtcgggaagggcgtgaaggtttacgtgttgtttgacaagatgtggacccttacctgcaaggctgccgtccggtgtgtgaagcggtttattcttgcaggcatcgagtgtcggtaccggctgtgcatgctgcactacaagctcacggcaatcattacaaggactgcagtaattacttggtctggatcggctaacctgacaatcgcggcgtggatccacagcgacgagcttttggtctgcacagagggaccttgtggtaagttttcgttttcgtttgtagcactttcaatcgcaacatttctgttttgctaacttgttgtacttttcacatttatagagtacgaggcatacaagttgttgtactggctgtggtcgagaggcatcactgcaacattggacgacttggccaatttggtcgcccgaaatccggtcggcagtgaagctggagacatcaccatcgtcgtgtcggacaaggagctcaagttcgtcgagggggaggctgggaagctgggactgcaggagtgggtcgacggctgctctaactacagacggatgactcgttacttggaccagtgcgcgcaggaacgcgagctcgctatgctctgcggtcagaacgcagtagttctagcggcagagcggcctcccatacgggatctggacgcccacggcctcccaatgcctgaaccacagagtccacccgcccccgaagcccctggccccttccaagctctacagactacagcggccaccctagaacgaacactgggcaaattaaagcaatggtcgccaatctatcgcttctggagtgtacaagacgaggtagaccagctacaacaagatgtgcaagacgcggtcgatgcgagactgcatggcgtctccactccccaacgagtcctcttggacgaaaagttacgcgttgcagaagcccgaaggcagaacaaagagcttcggatcaagcgagagagaagagagcatgccatactccgatacctcaaagtcaggaaggcattggattttgctgaagaagagcttgacgaagtggccctggaggagacaacagctcagacacgcgcaacggcagggtcaagcgcaagagggcgaaggcagagtgagcaaaaggaaacaagttatgtatttgtgcatttacactacttggctactcctgtcttccttatcggtggcgggtgcggcaagaatcgagcggcaaggtcctcgaggaagcgcgcacaccgattcgaccggacctggatcgtaacagggttatgagcccaagacccatccgggtctaaacgcgtgtctggctgcaagtgttgcaactgcggattgaagactccgaccactgccggatcagctggaagctggtggccgagtggggtagcgcgctgtccgatcagcgggagctggcgaccgagcgcgtgtgtgccgctgtccgatcagccgttggctggtgaccgagcggagcagctgtccgatcagcgtgtagctggtgactgagtgcgactccaactcactgtccgatcagccgctggctggagaccgagtgctgttggagaggagaaggacgtgctggacttcacgacgggcaagaaggtgctcgggagtgcgaaggaccaggcggagtttggcggaaaagaactgggagaccgtgcggaacgccggagagctggttctgaagaagagcttggagaccagcatatcgctggagagcaagttcgaggagaagacgctcgtggaccaacaagtgctaccatgttggaaaaggtagggcgccgcggggattgaactcacaacatacctgtagaacatagctcgttagaccgttacaccatacaggcgccccggtcgtcgtctcttcgggttgggacttgacactgtctgattgcatattccaacatttaaggactcaaagaagaaaatacccaagaagtgcttcatttgtgggagcaccgagcacttgagggctgagtgtcctgatcgagtggagggcaaccacggggggcggagctaatgctaatgagcagaagtggaaaccacgtgcgaacatgacgactcggcacgatgcgagccgtgacgcagattcgtccagcgagaacgatgagcttggcgagtcggcgagtcggctggacgctctgataattgatgcagggttgtcagctgattctggtgatgctgagagactagcgacatcggatgatgaggaagaacaggaagggaatgactctcacgcgcatgttggctggtggcatgacggccaagaccatgacgaaggcgaagcaaacaccagcagtggctggtggtacttcgacaccgccgcgaacgtgcacgtgacagggaacccctggtactatgttgcctttactccggatccgagtcagtcccagcatattcaaggtgtgactgctgctttggcatcgcgaattgctggagtaggcacggtagcgctgattactatggttgatggagaactagctccagtgactctgaacgatgtgttttacgtgcctggtgctacgcacggattgttttccattggactagctgctgaacagggctttgattttgattatgatcgtcagtcacgggactttcgagtgcaagatgaagggaggacagtgattgtggcaagtccacatgaggcaacgtggggattccaggttacccacccgtctaatggtgatgtcgtcggaccgcaggaccagcttctgagcaacttcacggctgcggacggtgtggcatcgctcaggctgtggcatgagcggctgggtcacacttgccctcagtatctgaaggtaatggtcgacaaatggctcgtacgtggcatgctgatgaagcagcgcgaccttggtgcctgtgacgcgtgccatatcggcaagcaaaagaagaagccgcacctaaagaagctcgagcggaacacgaaaacgccaaaccaagtggtctacgcggacctgctgatcccgagtaaggacaacggtactcgtttcgaagctgtgctcgtcattatggacggattctccagattcgtgacgctgcacctgcttacgagtaagtctagcgaagtggtgaaccgacacatcaaggaatatgtgttgtgggcagaaagacaagctggtcgacacaaggttcgtcaagtttggacgagaacgctccacgtcaaataaaaagtttgccaaatcctgacagacaagggtggtgaatttgttacacggagatggagttgtggtataaggctcatggtatcgagcatgttctggttggcccgaagagttcgcagctgaacttatgcgagcggactcatcagtctctcgtggagatgacgagggcgtcgatgcacgatgctggatttcctaagagtctgtggcctgaggctctacggaacgcggtgtaaatcaagaaccgtatctacaacaaaggcacaggtggggtcccgtatgagatgctgtttggtgtaaaacctgacttgcatcacgtacgcaagtttggggcgctcgcatacgttcacgtaccagtcacaccaggaaggaagaagcaccatgacaatgccagattgggtttcgtactcggctacgctgaggacgtgataggctgtaaggtgtatttcccggacaatcgcacagcaaaatttgtgtcggacctccgtgttgcagagggtgtgatgtaccgcgacagacatgaagtaactgtggaggaagatgacttggagtctttgcactttgtacaatcgggtgagatcgtcgaggacgacgacgctgtctcgacactctatgagtctactatggagttggaagcagaaggcaatactgccgccgcgccatcggtgcacgagaccatggccggaccgaccgtggatctcgagagaggcgagatgtgtggcgctccgagtgcagctccaagcgcaagtgcagctccaagcgcagaggcaagtggagatttgagtgcactaccgagtggcagtggccgctcacgcacagataccagggaggcgtctcgagcgacaccagctagcagtgtggcggatgttggtggagtgacggcagcactacccagtgagcctgcagaaatacgaagtacgcagacagaaacgcagtctgatcttgatgaattgcagagtgagttgcagagtgagcttttgactgggagtcaggatgattgtccgagtgatgatacggaaccggagcagcactcatccgtgatagactcacctggaactatggattcaccacccacacacgatgttgctgcaacgtccgatcctgcatcttgtgacggtagcgagtcggttgctggtcagtatggatctgacgtaggcgacacggaggaacttgatgatggaaatgcagtggctgctgaggaggaacttgacgatgaggatgcgactactgttgcgagtgtctgtggaaaattgatgggggaaacgtcaacgtgacgagactccttctgaggagattcgtgtagagcagagtgctgagaggcaggagccacagcgaactcggcgcactgggctgcgcgagtatcatgagcgtcggcgcccggcctacttgcgggactatgtgatgaatgtgacgcagaacacgtcacgggtgttggatcagaatggccgtccgatccgagcaagtgatgtacgcgttcctcgcaaccgcagggagtctcgacgtagcaagtaccgggagtttttcataagggcagagctggaggagatggctgcgatgaggtcacaacatgttctggaggagatcgccatcgaggacgttcccaaggacgcaaagccaatcaagacgagattcgtgtacgatatcaagacggaccaccaaggctacgtaattcgctttaaggcgaggctggttgcacttggcaactgccagtgccctggaatcgatttcggtgatacgttctcgcttgtggctcgtatgtcttcgtttcgtttgatggttggactagcaggagcactgaatctgatgctctatggcggagacatcaatacagcatacatgaacgcgaagctaggaatacgacagtatgtgaggtcgattgagggttcccctgtgaagtggatgggcacatctacgtggtagtgaaggcattgtatgggttaagacagtctggacgtgaatggaacaccgagttgaaccggtggatgctggatcgtggctatcaacggtctttgactgaaccctgcctgtattatcatgttgaagtcatagttactcccgccgtttacccgcgcttggttgaatctcttcactttgacattcagagcactgggcagaaatcacattgtgtcaacaccgtctccggccatcacaatgctttgttttaattaaacagtcggattccccttgtccgctccagttctgagccggttgttcaacgcactagggaaacagccgccagcccgaaagccaacgacctttctctccggcgcagcaagagcagcccgaccgccgggccgcatccggtccccgaaaggtgaggagatcatgccgggtttggtctatgtggatgacatcttggtggcgaccaaggatgaaaagcagaaggagaagttgttcgaagacctggagaaggagtacggactcaaggaccagggacttttgacgcagtatctcggggtggaagtggagcaaaccgctgaccgcttcatcatccgccagagcaagtacgctcgagaaattttggagaagtttggctacgctgaggcacagtcggttgggaacccgatggaggtgaatgctcgcctcgtgccgcttggtgatgatgaagaaagcgacaccagctttccatatcgagaggcagtgggtatgttaatgtatctgcccactagtacccgacctgatttggcgttcgcactgagccagctgagccgctttgtagcaaagccatccagcaagcatgttggggctctgaaacgagtcctacggtacctcgcaggtaccgtgaactatggaattacgtatgaccgacagtcgagcgagtcgaagactgtggtgcttgagggctactgcgacagtgactgggccaacgacccggagacccgcaaaagcacgacaggtttcgtgttcacgctggctggtggggcggtatcctggatgtcgagacgccaatccatcgtcgctctatctacggctgaggcagagtacgtggccgcctgtgaagcgacaatggaggcagttgcagaaagcaacattctgcaggaaatactgccacacaagtgtctgaagctgcgcattggtatcgacaaccaagccgcgcacatcatggctacgaatcctacctacagccgtcgcacccgacacattgagttgcgctggcactttgtgcgtgagcaagttgaacgaggcgtgattgaactgcacaagataagaggcgaggtgaaccccgctagcactttcacgaagccgctcgacaagctgcgtctgcagaacatgctggggctggccggcattggtgatgcggattagtcgaagctcatgcttcgagggaggcgtgttggaatgcacattgaagaccagggcgaaagctgagtcttggtacctgagaaaattagcagagctgagagctgcgggtcgttgcatgagaaacgggctcaagcccgagagtagtggtaagagctgggaggctcagccaatcaatctttttcctttttcctactagtggccgtacggaccaacaagtgcaccttccaaaaccagcagtatccttccagctctgtacctgcatccactaccatggggctctggtccagagagggcgtcacgcacaacgtgtggacggcctacgtcttcacgctcttcttctggtccgcccgaaggtagaatgcccctttgccaaccaaaatgtatcaatcccctccctccttgcattaacgagccattgccgccagtattctgttccagcaggtcgtggccggctacgtgttcgtgctcacggcgtccaacaagcccgtgggcatcgtcaagggcatccagggtatctcgcagctcgtcttctcgctgccgggcggctacttcgccgaccgcacgcggcgcgacacgatcctcaagctctcgggcgccattggcatcgtgggcgccgtcatcaccttcctctcggtcgagatgacgtccgtcacggggctctacgtggccttcgggctctgggggctcttcgcggccttccagagccccgccatggaggcgctcttcgccgactcgatcccgccgggcaagcgcagcttccccttcatgatcaagtacaacatcagcaacctggcgcagatgctcgggcccgtgctcagcatcttcctcttcctcttctacggcgacgagtggcagctgcccgagctcaagcccgtgctcgagttcggctgcgtgctggcggtcgtgggctcgctcgtgctcttccagttcgacgacgaccgcgccaaggactacatgctggacaagagtcaggaggagaaggaggaggaggagctgctcgagaagatggtcacgccgtccccgctgcggacgcccaagctggtgggcaacggcgccgagatcgacatggtgtacgactactcggacgaggacgacatcactgtggacgacaagtcgccgccgaccgcgacggagaacacggcgctgctgctgctcaagggcaagaccgccaaggagctggatctggagcgccagcagcggctgcagcaggaggacgatgacgaggaagaagggtacatggcccacctggacgccaagttcctgtgcttccgcaccaagcacgtgccgtacatcctgttcgtctcggactttgtgatcagcaacggcgccggcatgaccatcaacttcttcccgctcttcttcaaggaggagtacggcctcacgccgatccacgtctgcgcgctgttcatgagccagccgctcgtcgtcatgatcctgtcgttcatcgcgcagcgattgtccaagccgtgcggtcgcatgcccattatcgccttcacgcgcgccttctccgtcgcgtgtctgttttccatggcgtacgcgcagccgatggcgctgcagatcgtgctgttcttgatgcgtggaggcatgatgcgctgctcgcagcctctgcgccgctcaatcctgatggactacgtgccgaagaacattcgtgcgcgctggaacgcgctggagggtttgtcggtgttctcctggtcgggcagtgctgtgcttggaggcttcttgatcgacgcgtacggctaccgcatgtgtttcattattacgtcgctcgtctactgcgtgggcttgagcatggagatggtcctcttgccactgaccaagcacgcggttgaaagatagacagatataatcctgctcccgacccattcactaagcttacaaacaaggttcgctagtagtattaccgattatcatcaacacactcgacgtgagctctacacatcgaagatcctctcacgcgccacctccagtgcgttcttgttcatcacggagctgatgcacgccgggcagaacctcacgtttctcctggccaactgcatgtccgggtctacgaagctcagcttctgcaccaccttgcacgaatgacagacgtgaccgaagcacaacctgcacgtattgtttcccttggccatatcgccaagcacgtcacgcacacgcttctgctgttggggactcctttgactttggacttagcgaagactcgatccagcgtgtagctcaatttgcgcatctggccgctaaacgagcacttgacaacgacaggaacgcgttggccatgcctggcacaagaagcttgcggatcatgtcaccgcccggacccatgctgccagtcgagtacatttcaatttggtttggcccagcctgacgccaaaagccgatgattgacgtgctgcctcggactcggttcgaaagttcatgcgtctccggaaagcttaccgagtgaacgaactggtaccccagacgctcaccgttgtcgcgttgaacatacccagtgtcttcgagatatacgtagtcgcggttcttcacgaggctcgtcgaggcgagaggaggatcgagctccatccacttgagcatgagcgtctggaacgggttctcgacacttggctcgacaatggtatccagcaccgcggcgccactgatgtcatcgacgtacgaagctttgaggcgcattgcctctaggtcctcattgatgataccgaacatcaagtcgtcgagcttcccctccagggtccccacgcacaagattgtcggaagaccaccacccgatggctcacagcttttagcggagtgagcagactcaagtcgctcagtgaacacccgtaggccttcgcgcgtcttcagcggctttcagcgacgaggatcgacaaggcggatggccggccgcaggtaagcgttgcataactcgagattagattcgacgatgttcttggccacgtcctgcagttgaagtcggtcgtcggcagtgaggcggagttccggaaacgggttgagcacgaagcgtcctttgctcatgagcagtgatggccaaaaatgtacgggaaggcattggaggtaaagcgatctgtagcaatatgaattgcagtaccaacgcagccagcaataataactgcaatactggtcgttcttgcaataattactgcaatactataaccatagtactctgtcgtcgtagaggtcgccgatagcacatatgccgtcggaactgggttttgagaacattattgtcttgacattgacagccttgctgcttctaagtgaaatactagggtttgaagagtttattcggctggcttaagacagtaagaattgcaattccgcagcgctctgcattgcaatagcttgcaagcttgcagtatggcattgcaataagtattggtaaatgccaatacctgcaatacatttttggccatcactgctcatgagtatgactatttatacgagctgggggtggtgcttgagagggattgaaatcaaaagtgaggctacgaagcatgaccaagctgatcagatcgatacaaatacttcgtttgtcactcggtgcggtcaggcagttcgtggtttcgggggtcagacgtaggtgccaatctagcctctgggggcaccaactccacaacttaaatcagccggagctgggccgtctctacaaggaaaatattgttggctcacttaacggataattcgtcacgaaaatggtatgagttctttctgacagtcaatttactaaacaagacgagacgtacgaggctcaccgactaatcttcagacaagtaggctagttcgctaccaaagtccccgctctcagtcgagctggtgtggctcctaaggtagttaacgcccttcttcgtggaaagcattttcgctcgaacgacgtcgatagcactcatgcccttcaccaagttgatacaagcagtgcagaatgtcaccttgcgtctggacagcatcaggtctgggtccacgaaactcatcttcttcacgactttgcacgaatggcacacgtgcccgaagcacagtttgcaggtgctgttgctccttccaaagtcaccaagccgacggcctgcgagtgaactgctacaaacgacgcacccgttcgtcctgtggggcgtgccgtgctgcctgaactccgtgtaggccttgtcgagcatgaacgaaagcttgcgcatttcaccgcagttggcgtacttgacgctggacaagaaggcagaagccattcccggcaccaccagaacgcggatccaatcgccgcaaggatcaaagatgccggtagcgtagatctccatcgtgttgggcccagcttgtcgccaaaaaccaatgatcgatgcgttgccccgaattcggttgggaagctgatgcgtttgtgggaagctcacggtgtggaggaggtggtagccgagtcgttcaccattttcggcagtcacgaacccggtcccctcagcgtacacgtagtcccggttcttgacgaggttggtcgaggcgaacgggatatcaagctccatccacttgatgacgagagactggaacggatcttcgagcgttggcagcacaatggggtctagcaccgcagcaccgctgacgtcgtcgacgtacgaggccttgagccgcatggtctcgaggtcttcactcatcacgccgtacatcaagtcttccagcttgccttccatggttccgatgcatagaatcattggaagaccagagcctgtgaggtcgttagcaccggagcatcgggcgctttcaggccgctctgcatacacagtgagcttctctcgcgtcttgatcttcttccagcgtttcggattgacttttcgcttgctcaaggatacaaagttgttgtacttctggaagttggacatgatgaggtcgttcgctagatcctgcaactgcagccgctcgtcgggcaacatctgcatctccgggaacgggttcacgataaatcgctccttgcccatggtgttttgtgctgcgaagaacttgagaacgaaagtgagagcgatatgacagtgcttgctttcgttctctacagaaacagtctgtattcataacatgttagaatgacgaaccagcctctgccacatcgaggacaaatggatacacgaaatcaggatactttagcctttacctctcagctggtagggatccctcagcagcagaattaggtttctttagccagctctaccacaagtctatagcctgttaatcaattttattcttctctcagctggttgggacagcgtgataagaaaaaatacgcacttgttcagattaggggtagtcaatgtccgcagcaacagctcacttttttccgccgcagcaagtcggatttttttccggggctgtgattggccaggaaaaaaatcggcgaccggaacaaaaagtcattccagtcgagccgcctcgtaatagaggtgacatttgggcaagcagctggcggtagctaatgcgggtaaatgggtaccttgaccaaaaacagtgatgggcattatgagtcaaacagttcaacactggtacattgcgaagactgtcgacgcagaacgccatgactggcgcgacctgtccgctatcaaccgccgcgttctgtaggcaccgagtcttggtcgccttggcatgtgcagctttgcggagcttgctttcagcgcatcaatgatgaaaagggatcgtaatgctggtatcattcgcggttggcctgcggcgccgacgccgctgcctcaagcagcggatttgtcaatgaagcagcttccccactatgaatctacgagtcacaaggaagatagactacagccgtgaggaaaccgtgatgtcgaagctgctgggctgtagctttaatgctaacaagctccatcgcattatagacaattgacaaaagcttgttaagaatatgtatgacccgtggtagtttcagaaatcctccacagtggaggtgatctgcaccacaaaaataactttgtgcaagataagacacccaggcagggacacacctctatataacttcttcgctacaacactttcgcacagactgctttccaacggggttttcatcgttcctacgaagcacagggctctatcaacacgaacatcgatggagtggaacgagtctgctggttaccactctgctgaccccactttgcggagcgattacgatgataacggctcgtcgactgcttctaccgtcttcgaaaccagcgatttcgacatggatgtggtccttgatgaggttttggcaagtaatgtggactcggatctcgattctgacgagacagcgtatgggaaaccgatgaagaatatgtcacgagctgtatagcggatgcggttcgagaagagtttaatgtaccctttgacgaccacgactggcatgaatttgacttcgcagatttcaatttggacactgagattttgggcgacgttgaagttctttctgagctggactatgactcgctgcttgatttgatgtgcgcgcatcaacttgccgcggaggagaagggagtaggaggcgacgacgcagattcaggaaaaagggaacagagtgcgctgacggggtctgcacggcacaattagtggcatttgacgatgccaaagggagttgttatccgcaccttggtagcgaggtctacataattccaccgccccctcaactgacgtacgaatcgcatggtgctgcggaggctgctatacacgcttggacactcgcacacaactacaatctatcgcggcgtcgggttcggtatctaccaggcactaaaactgtttgggcgcgaaagtacgagtgtgaccgtgctgggtggctaaaaaacacacagcatttagtcgagagcgagcggcagcgaccaatgcgtggatcgaagcgatgtggctgccccatgccactaaagatgtgtgctgtatcgaagtcggacgtggatggtccttggaaagttgtacacacgcgctacaaaagcgaggtacacaaccaccccgcagcggaagatgtccgtgtacattcggctcaccggacacgtgccgctgccagtatgtcgacgacccagcaaacaatgggagacctaattgcaagtcagacggcagcgggcattccagttgccaaaatacgagcatctatcctcaatagcaatctcaactctctggtgttgccaaaagacatcggaaacctgaaaatgaaggcccgaaagcaggctatggctacccagacaccactggaggcacttttttctcttttggagcaccacaagtttttctatcgcaatgagattaatccagagacacatgagttgttgtacttgttgtgggcgcatccggcgacattacgtctctacaagcggcattgcgacgtcctgatcatggatgctacgatcaagaccaacaactacgacctgcctatggtgaatgtcattgcaatgacaggaatgaactcggttctacccgtcgcccagtgttttctgcctggtcaaaaggatagtgattttttgtgggtcttagagcggttccgggagttgatgcattgcaatagaatccaactcgcgtctgtaaacctcacagatcgagagttggcagtgatgagtgctctcgacactgtatttcccaccgtcccgtcattgatttgtaggtgtcatctgaatcagaatgtgttggcgaaagttagaagtgttcttggtcaggttcaagtcgaaaacccactaccaggtcaagataagtgggagaatacctggcagaccgaggtctttatgacgtatttctatcgggccgtggagtcacccactgaatatgagtatgagctgcagtgtgtgattttgaaggacctctccccgagtttagcagcctacttagagatgcattggtggaagtacaagacataactcgtgcgctgttggacaaataagtacaaacattttgagtatcgggatacgtcggcagtggagggcacacatgcacagtgcaaacgttggctccaggacagcaatggcaacttgtacactgattttcaaccgccttttgccacggtggctttcatctgcaagctctgtgagtattcgtgcggctcgcgacgcaaccattcttccatacctatttcagaatgatcgctacacccaagtgggtcgagttattacggtttgggctctacgtgctaccgacgagctttggaaagaggcgattcgaatgtggactggattaagtccattccgtgaatgcacgggtgtgttcagaacggtgaacgggcgaccttgcgttcacgagctagtttcaatcatccggtctaatgggcggctaaagctcctaccgacaatgtttgaccctcactggtggatatatcgtgataagattgagacgtggcagcctcgcatattggagcccgctagtctacgtaccagacggcgtcaagctcgatctcaccgagctaaccacggtgtgagtggcacagcccgtgaacccacttgcagaaagaattgaccttaaccatccggcaccttcacctcaatatcttcaaggcggaagtggcatggttctgactagctcttagctggaccaagtacacaccggacggaccggcggttttagtcactggatacagcaagatcgggttgttgaatcagtggtcgcgcacctagactctcagtttctgtcgattccacctccaaggttccaccgtcccatccagtaccaacagcaatcccagcaatcttaccaccaaccacatatcccgccgcgctattggggggacgcaggtagacagcccttctagaggtactcatacaaagaaatctatgagtacccgtacgatatctatgacttctggtaccctatccatgaggtggtagagttgtatccatgacttccagtgttctatccatgaattgaaacaattggcgggaacccgggttcccgcaaatgataccgaccaaatggcgaattatttattttatttttggtctccatattggtaccctcggggcaagttaaaccctcatacctaagagcatctccagcagttggtctcaaacacggttttatcctaaaagtaacgctgttaagacttggccgagacgtaaggcttccaccagaaggtcctattgcaggttttaacttcaccgggacctataaattggctttcgagtcttaaaataagaccacaatcttaatgccacccatacaaaactgaagtgtcgccgtatttaaaagattgcaccaagactgaatgcaattttcacatgcgggaatggacttataagactcgctttagaactcgccgctggaagtaagtcggtctgcgcgggtctcaactgtaaaattgtggtctcaaagaccctgttacgtcttaggataagacccaccgctggagatgctctaagtgctgtcgatgaaggactaccctcaaaatatgccaccggtactgaatagacccaaataacataccttaccatgtccaagtttatctttcatgagcaggaggatagcgatgagaccgggaagcactgtaccgctgcacaaggcaagcgtctggattttcgtggagagacacaggacgagggcgaaggtgaattaaccttccgttcccctactgagctttagcgttctatgtaggtcatagaccaacacttcaatacatttgctcatacatgtgtaccggtagttttgggggaaccggggtcccgatgggtacccgggttcccgccaattgtttcaattgtagaaacggatccatgatgttcactagccgatccatgaattgtagaaacggatccatgattttcagtaggcgatccatgagttcaactatactgatgaccactggtttctgatccatgagatgtactagatcacagtacgagacaccgcctatttcacgaccgaagctgatcctcgactttctatacaaatcgatgacttcaataccaactccatgaataccggtactatatccatgaaattacacgcggtatccatgatgagcggtagccgatccatgacttgtggtatcggatccttgaaattgtcgaattgtatatatgcgttcgtaaatccgatcttcgggtttcaataatacaaaggtgtctacatacacttcataaatatttcaacatccgtgcatacagtgtacatctatccgtttactgttgacgtggtaaaatattaaaacaaacacttgctaagaaaaaaatgatcaaatcgatggccattgtgtttttcattaacgctagttaacctaaagcccgaaaaacttcagcgagatcttccttcagcatttgtgcacgttgtacgtgtttttattccgaagtggcgctggcattttttgcagaacgcccccttgtcgttgttggccttccactttctggcgatggcctccttctcagggttactgtcgcaatagcgctggtggttggtgagagatcgcttagagtcgcttcgcttgaagcagaagcggcagcggtagaacccccaggcaactcgctctacagtagcgtcgtgtgccacgttgtcaaccagtagagtgccttgaaggcgaacatcatgcgcctctgcacgtgggtctgcatgtggcaggtcgccacggaagataagtagatctcctgcgttcatctcaatgacgtaagcgttggatcgaattgcgcatctgttgaacgcctcagggaccgtgatcaccttcggtccatccgtgagggcgagcagcactgaagcctgaacccattcatgggcctcaatcgttgccgccgtctccgttgacacgaagtcgcgatgcaggtgctgaggcggccaaccaggcgacagctcaaccacgtcccacttcgtcgtcaccgtccaggaatgatgaagcctgccggcgaagtcgaccatgcgctcgtgcacaaagcgaaacgcagggggggggggtgcgttgatgttgtccgcgagactgagaggtgcttgacggcgatgagcaatcccagtctcgcgaaaccacttggcctctgacaggccgtccacggcacgacgcacagcgctaacctcgtcttgggtgaggaattccttaactacgtggtaaccgtcgttccatatcccgcagataatggcgacgacggcgggcgtgcttggcgcggggttgacgctcatgctggtggggcttgcttgaactggtatcttgagtaggagggggcggcttgcagagtgagatccacacgagggatcatggatggcgctggttcgccgccccctagcacccaaaaagaatttgggtattgatgtacacatttacccgcattagctaccgccagctgcttgcccaaatgtcacctctattacgagggccgtccccatgagggccctccttagcgattcccgtcgagccgcagcagcagctcgtttttttctggcgcggccaagatctgagcaccaacggtacggtagcatggtcgtcgcgcgagagaagactccacccttggggcttgcgctgcgagcagagtactcggaaggtcaatctagtaagcctacttgtgtccgtcggatgccttgatgtccagcaagcgttgctccagcgcgatcatgtaataatgcacaatgtatgtcgagggacagagagaacacgagcccttccacgagctctgtatctatactacactcgagtcttccttagcaagcagccgcctaggactgtgtctaaagctgcatccactaatcgctgcgtgttggaaggcgctgagagtagtgagcggacggcagttcgctccgctagctacagctaacttagccctactttcgcatcggcagcccgagcaacaagcgcctcccccaacaaaactcaacacgctcagtctcctcaccttgaccatcaacaacaggtgggcctccttcgtgctcacgcgcgacctcagcaactctacaactcggatagacgccgactggattttcatgctaagatcaacacctaccacgccgattgcagtaggatgaacacgctgttgccttctcacactcaacctgaaggaggcagaggacaccaccttcctcttgctggcgctccgggcattccagcgtacgcttcccagcatcccagaggacaagcacgtagactggggcgtttgaagccgaggggggacggaaaatcttgatctgttgctgcggacagtgaatggggtggtcaatgcactcagcttgtgattggtaaaaaaaaatttgtcgtgtctgagtgagaaaaaaaattagttgctgctgcaggcattgactacccctaccgtatatgagatctcctacttcagacccctgattattgaagttgtagcgtcgtacatagtttttgttcatttttagtccctttcgtgcaaaatatggccatattctgctcgatttgcacgttttctacggtatgaaattaggagatctctctgaagtaggagatctcatatacggtattatttagtgctcacgatttttcaatgaacaacggtcacagtagataaactcggcgtgaacagatagaacatttgcaaaaggtgcgttagtttacactacacaagatatcaatatcaccaccccccagcaaccgcgctgtaatgattaatacgtcgagctgctgtacgacatctcgctgctgtagtccccgctcagtgtcgagttggtctgaatgctcgagtggtcaacgtccttccgaactgtcagcatcttcgcttgcgcacagtcgctcgcgttcatattggtcaccgagccgatgcagcccgtgcagaatgtcacctttcgcttggacagctgcaggtcggggtccacgaagctcaacttgcggacaattctgcacgcgtggcagacgtggccaaagcacagcttgcatgtgctgttgctcttcgagaagtctcccaatcgacgaccgattggagacgagcaggtgacgcagatgctcttcttgttaggagctccacgctgctttgattccgcataggccttgtcgagcatgaagctgagcttgcgcatctggccacagaacccgtacttgacacttgaaaggaaagcagtagccatccctgggacgacgagcatgcggatcatatcaccacacggatcgaagattcccgtggcgtacatttccatgacgttgggggcagcctaacgccaaaacccaatgatggacacgttgcctcgaatccggttcggcagctcatgcgtctgaggaaagctgaccgagtggagcaagtgatagccgagacgctcaccgctctgcgaagtggcgaagcccgtgccttcgagatacacgtagtctcgattcttgaccagactggtcgacgcgaacgggatatcgagctccatccacttgacgaggagggactggaacggttcttccagggtggggaggaccacagagtccaacacagcagctccactgacgtcgtcaacatatgaggccttgattcgcatcgtctccaggtcttcgctcatcactccgtacatgtgatcttcgagcttgccctcgatcgaccccacacagaggatcattggaagtccggaacccgatggctcaccatcagagatgtgagcggattccggcctctccgcgtacactgtgaggttctcgcgctccttgatctgtttccagcgacgggagtcgactttgcgcttgtgcgaggagacgaacgtgttgtagttggcgaggttggacatgataatgccattcgcgaggtcttgcagctgcaaccggtcgtcttgagatatattcatggctgtgaaggggttcacgatgaagcgttctttccccatggtggttagttggctcttgtctggggtgatggcaggaagagtgctggaagtggaatgacgatccgaattccaatgtgaacagtcaacgcgactcagggtgtgaggtgattcattcatgtgttaaacagatcagtccaggataagacgcacgtgcttcaatttgaagtcacatttaaaatgttctttagtaagaacgaatattaataaatatatgttcttttgtttaccggtaacaaagagaaagtgtgattcatgcttctcaaaatgcgtgtccgtgtttgcggtaaatattgtattaaaaatggggatttatgagatgcagattaaaatagtttttctgcaaagcgttggcagcgaggcgctgctaatcaagttttccgtcgggccactgtggcggatcccccagaacgacttgaagaaattcatttttttacggaaacgagagcttttcagcttcgatcatctgacagtcaagtgtagatgcataaactcaggcgatctggtttatgcatttacacttcccatttttcttccaggtaccctcagttaggataaatgaactcaatctaacctcaaccttgaaatgaaaaaaaatgtcaataaagtgtctgcgactgtagttcacgctctatggggtcatatctcgaccacaaccttgatttcatcgtagagaagccgaagttcagcacgattgcggtccaaatgagcgtgctgcctgctatcagtaggaagccattgtaagcgatcgctgaatctattacgagcagctgaacgactgacctttcaaagtcaactacggcgccatcatggccagtacgtggatggtctccatgccgttgatcttatcggggcgtcatcaatcagccaaaacggaacggcacacacacttttagtcaggtccgcctagacgatgggggtggcgcaaccgttttgcaacttgttcaatcccgagatgatgtgagcagcagcatcctcggccacctgaggtcgtcgccatatggggtcatttagcaagaaaaaagttaggaatgaccagtccaaagcttcaacaggtgctccaacttgacctggtgggtgaagtcgacgacatcctcaacactttatcccccaggtagcgagggatagcctgcctaccatctcttcagtcattccggatttctctccatctccctcaagtccgtctcaccttccagctctcgccgactatggtgaagggtcgattcaccgtcaaccctttcaaggagctggcgctcactccagacgacataagtaacctacacgagatctccagcgccatcctcgactcgaatctgtcgaggtacgaggactacatcaacgtcgacaagggtaaggtcgactcagcgcaatggaagttggtaaagtccaaggacaacacgagagtttttcatgagaaatccaccggatctagcaacgcagcgccgctccctcaagcttccgggtcttccaaggaccttccgtctctgctctgcgtcgggaccacagttggagatatggaagacatgatgtttggcgtggtgaacccgacgctcgagatcacgcgcatcaaggcctcgtatgttgacgacctcagcggagctgctgtgctggccaacatcgtcgatccgacgttggagaaccccttcaactccctcgttgtcaagtggatggagatcgatattccgctccagtccatgggcctcgtcaggaaccgcgactacatctacgtggaggccacgggcttcgtgaatctagctaacggcgagaaggtcggctaccacattctgcactctgtcaacttcccggagacgcacgagttgcccaaccgagtgcgcgcgaatctgtcgatctgcggtttcttccgacaagtccgacccaacgcaagtgagatcttcgtcactggcctgatggatccgggcggtgacatgatccgcatgctggtggtgcccacaatggccaatgcgttcttgtcgactctgaagtacgcacactgcggtcagatgaagaagcttcagtacatgctggagaagcgatacgccgaggccaaggagctggggacgccgaaccgagagcacatttgcgtgacatgcagccaaccgatcacgaaccgcaggcttggcgactttggcaagaccgacgctacctgcaagctctgcttcggctacgtgtgtggcagctgcaagatccagaggaagctgagcttcgtgaccccggatctgctcttggcgcagcgcaaggtcacgttctgcgccgtgtgtttgaacgatgcgatccgagcccccgcagcggacgctgccagagcgcaactcgtatcatcagtcggtgggttgtcaaaacagcacttgtacaaccatggctccgaggcaagtaccgtgtcagagtatgcgtcgagctgtggataactattatgtaggacttacgttttctgaaggaaaagtaatgtttttttttatacgctcactgcttaggcaaacttaaaaaaaactctcgatccctgggctaaactttcatgaataagggtgagctagaaaagcttgccagttgaaatctttcatggagggaagatacagttggcgagcgccgagttgcgatcgaggtatcagccgtgagccgatcacacttgaaacgagggatccgcttggcatagagactgacagcaggcgccaaaaagtctgtgtctttccccgataagaacatgcttacgctggctggcccggacagaattgtacttagtaagcatttgccgagtcctacccgctcagcagctgagtcagcttgcatacgttgatgcgttaacggtaagatgctgcaacagtgtcctaaaatactcgattgctggggagcaacatccttatcgatgatgctgatttatgaacccccagatgactcgtcgcgttccgttccaagacgtagagcagttggcgagacttgcgtgtactgtgcacggtagcttcgctcgacaagagggctacgcccccctcagagcccagcgattattgctactctgtcgaatagatcattctcgttcttgcttcaatccagccacccgactacctcctcccaagcgagcaccagtccaactttcagcagctcagaagctccgcgcatcatggtgaaaggccgattcacagtgaacccgttcccgaacttgaagttgacgccggcggacacgggcaacctccacgagatagcgagctccatcctcgaggccaacatccaacgctacgaagacttcctgaccaaggagaacaagaagatcgacgcggataagtggaaagtactcaagaccaaggagaactccaccgtgtacacggctcgacaccacgacgtctaccgcacgggcgctacaacccaccgcggccaccaagcgcatccagcactgccgtctctactcagtctggggacgacggtggggtctttggaggacatgatgctcggcgtcgtgaacccgacgctggagatcatgcggatcaaggcctcgtacgttgacgacctgagtggagccgccgtgctggccaacctcgaggaccctacactggacgacccgttccggtcgctggtggtcaagtggatggagctcgatatccctctccacacgaccagcctcgtcaacaaccgcgactatgtctacctagaagccactgggatggccgccctctcgacaggcgagcgagtgggctaccatgtgctgcactcggtcaacttcccgcagactcacgagctgcctggacgcgtgcgtgccgatacgtcgatctgcggtatcttccgtcagatccgacccaacgccatcgaagtcttcgtctcgggcgtgatggacccgggcggtgacatgatccgcatcctggtggtccccagcatcgcttctgtcttcctgtccacgctcaagtacgtgcactgcggccaaatgaagaaactcgcgtggatgctggagaagcgctacgctgaagccaaagagctcgggactcccaatcgcgagcacatctgcgtcacatgttcggctccgatcaaaaaccgaagaatcggcgacttcggcaagagcagtagcacctgcaagttgtgctttggctacgtctgccatggctgcaagatcgagcggaagctgagcttcgtgacgccggatctactgctggcccaaaggaaggtcacgttctgtgccgtgtgcttgaacgatgcggtccgagagaatgcaaccgttgcagccagagcgcaaattgctgcctgtggtgaagtcggtgaagtcggcaagacgcatcagtattctacagtgtcagacgcctccactgtgtcggggtattcatcctcgcaaggatagttatcaacgctacttacattgtggtgcatttgttcgatagtggcccaaagcaatataagcaaacttctttgatgtgtaataggagcttcaatccatagcgtaagtatccgtagcgtaggatacacacacttgttgagtacatgaacaccaatggcaggcatgagatgatacagtgcatccattactgtggcccttgcaccagttgtggtcacattaacgcgctacgtttgcctccttcacctgtcgtccagcatctgctgcgcctttcgctagttctgcaatccgaggcgttggtgtccacactaattctttcttatctccaaattaagaaagccttggacaaaccacttgtcaaggcaagtgaacgcaaccaaaaatgttttcaatctcgatcagaaacctcgctatctgacccccagctgtggtcaactggtcgggaaggttgcgactatatcctagtctatccgcttgcgtgcctgagtgtctggtacttggcctctccgtccttgcgtgccaattcagactgaccagctggagtacctgtgccttggttgcagcaatgcacttaccatgcgtcctccatcctctaccagccggtcacggacctcgctttcgggtcggcgaatcattctgcgactcgcgctgtccaagtcactctccaccaccgactttcgtatctgcaccctacatcgctcgacgtcgcgttggtcatgaccaagggccgattcaccgttaacccgttcaatgagctccatttgacaccttcggacgtggatgacctcgagaaactcgtcgcctccatccttgatgccaacatcgcacggtatgaggagttcctgttcaaggagaactgcaggatcgacgctgatagctggaaactagtcaagagccgagacaacaccaaggtctactccgaacgcaacttcggttcaaccggcgtgggtcccaatgtagtgctgtcgggtcaatcgtcggacctgccttccctcctctgcttcggtaccgcagtcggagccctggacgatatgatgtttggtgtcgtgaacccgacgctcgaggtcatgcggatcaaggggtcgtgtaggaacacacactaaattatataatagcacactttccccaccaacaacacccaccaagtcccgatgactcaatgggcttgttcgggttagaacctgaaggcccaggaactttcccttgcaccgggttgatgtttcctctgtgcaccgtgtttccgctttgtcaactgacggaaacccagcgtcaccagccacgagcaaaggctgacacgctctcacacacaatataaacctcgcaggccctcaggaaggaagggtcccagccagtcacggcttgatacgagggtgccggagctatactccgacgggaatgataaatggagtgcgctctcgctcctccactacacggcgatgactggcccttcgtatacacggccacttcttcactactcttggcctgaccacgggtaaacgcacgctacgatactagcgtccactgatagtcataatcctaccaacaggtttatccatttgctacgggaactcaccgatagcccggacgtcttccttgaatggttgagaggaaaagctgttctgtcattgttgcccaaagggcttatctgttctatcttctctttcctatgatttaatacaaatatctagtctagacgtgtccgttgtggatcttccaggtaaccgcccgactcttcagaactctcttgaaggctcggacggcctcccgatgactcgaagagtcgccttaggtgcggagcccaggccaaagttcgccgtaggttcgggtcgtccttgaagttccggtgttgtgtggacacaccacggcttgagcttgagtgtcgacgagtcatcgtcattggcccagactgaccaatccgcggccgtcgaacaccatcgaacgaatggcgatgtgcctcgatccgccagttgagtcgacgccgaatgccgcggggcttgccgtgagcttcactcaactttctcgacaccacagctgcccacaccgtgtcgcgtgccacagcacttggtgagcgtcagggtgctcccggtgtcttcgcgctaccacggctgggtcgtctcgcgccgcgaaggctgcgctggcccgcgcgttccgggcgctcggcgtcgatcccgctgacatggtacgtgctgcgttcggtctcctgctcgtgccgtcgactgctcaccctcacgcgtgtgcgcttgttctgctggcgccaggctcccgctgcgtcgagttctggtggcggcctctccggccaggcttctgctgcgtcttcgcctgctcggccgtcgtcttccgctcgcgctgggtcgacggctgccggtactccgcgtccaggcgatgccgcacaggtgcgtaccctgtcactgcatgcgtctcccttcttttcactcgtgctgacgttgttctcgttgatgcgtctgcttatatctgcagtcggctggtggcgtgcctccgcagccacttatcgaggctatgcgtggccacgaggcttcgggaaccccggcaacctctcggcctgggtctcctggttcttctcagcctgctcccgacaactcgcgcggtcgtggtcaagttatgcgtcgcgacgcccttgagcagctggtccgtgatgcatgtgatgagtcgtcggagcgcatcttggcggtgctaggctcgaggctggagtctctcggccgtctctcggtgaacctgcagctgggaccgagcatccgtggtgatcgccgcgtgggttctcgcctggcgtcggcccggaacctcgatgaagtggttactgctgcggaaccaaacatggatgttggcgaaggctcgacgctggacatggcaactatgcgcgcccagctgcactctgctgagtcagcgcaggctgctgcagagaatcggttgcggtcgcagacgtactctttggagaaccagaaggtattcttgaagaacgcgaacgacgagatcgcacagctgaagaaggatgtagcgcatcttcgtcagctggaggctcattacatcgtcgagctcgagtcgtcgaacgccgccatgggtggcctcagagagtgttccgagcggcaggagaatcgtgtcagggtggccgaagactcgcaagctcgagctctagctcagttgaaacgtgagcaggaggtctacaaggcggccgttgcttcgtcgactgctcaaagcaggcgcttgcacgatctgctggctcgctcggacgccgccgacgacaccgcaccagctcgccttcgccgccgcaatgaggacctcgaagagcaagtgaagcggctgacccgtgccaacaagacgcttcgcgctcacgtgcagctggaagaaatggaccccgacgtcctggtcctcgccgtagaaggtttcgtagttaccatttggtcgtcatttggtttatgtttgctgactttgtcccgatgactcatcttgcttgcaggtatctcgactggtgaactcaattggagcttgctggattttactcccgagtctctcgcgattttgcagaagcagtaccgtacagcagaccgctccaagccggacagagatatcgccgaagactcggctcggactgccttctcactgaatgactccattggggatcccttgcgcaaggacactcccgctggtgctaacaagaccactccggggatgtctgccactgcagtcaagaaatctcgcgcgtcgcgtcggtcatcgtcttctccacggttcttgtcccgcaagaggtctcgcgaagactcgggctacgtcagtgctgctgcttccccagctcggccgagtcgctcagggtcgaaggctcgcaagacttctgccgagtcatcggatgggtcatcggcgtcatctcccgtgaggaaggcgtcggagaagccaaagaagttgcccaagaagcggaaggagtctcgctgggcacgaagtcgttctgcgtcggtgcctcgcggctctccggtctacgcgcgcttcatcggttccagtgtctctccgcccacgagtcctactccagtcgcgaaggctactgcgccctctgttcctggttctgcgccgcctgctgcttctgcggaaactcctgtccaagctgttgtcccagtctctggttccggtgatgatccacaagttggtggcttgagtcatcgggctgatcgcggagggacggacgagcagttagcttcagtcgagcagtctccggagatgcctcagtagttcggagatgactcggatgctggattgacggaggttcttgttgacgactcagtggttaattgctgtgctgcttctgctgatgaggaggaactcgacgagtgggagggagagcgcgttgaggtggttgctgtagttccagctccgtcacctccggttgctgacggtctatcggcttccactgatctctcgtcacctgcgccagctctgcctcctgccagccctgagtcatcggcttctcttccgcttgttcctgcagcttctgctgagtcggcggacacctcggtcgctgtcccatcggctcgccggcctgaaaatgcggcatctcagaaggttccgacgactcgtgcccgaggtaagaagccggctaagtctcgccataagttgtcatcgcgccaagtcgtcactacgcagttatcggccccaggaccaagttcaagttctgcgcgctctctgtctgcctcgccggcagcccgagatgtgctgcccactgctcgttactccaaacacgtgttgaactgggccactccatacttggctcctgaagtccggtttcctggcgcttctaagtgctggatccagattttgaattgcgagttgccgactcctattcccggggatgctcggattgctgccacggctgctggtatcaaggcgtttaaagacttcaagaacccggaccacccttggcagcagcttcgcctgcgtctcctggagcacgcatgtttgttcgacacccatggatttgatccttctgtcaaggtctcccagcgagcgcccccgacgactcgagttaacgggtattggagcaactttcgagggtacggggatcctgtcgacattgatcttgggttctcggattgggagcgttaccactggattccggctcccgccgtggagaattgcttccggatcgctaccaaggagctggaagggaataattggtcccctgaggcgaaggccaaagttcgagctgagctggacgaggccaaggctgagtggttggcgtatgctgccgagcggaacaagcgctgggatcggttccgagccaagatcatctaccaggtctggagatggtttgtcagcaaggaaccgaagttcgctgctctccacaccgagtctttgtttgagtcttctatgctgggttgccctttcgacaacctcacgtggctgctcaagacgaccgactgggtcagcgagatttcggcgttggacgcggctgagccgtggcgtaatggctgggtggatgttcctgcccagcatccgtacaacacgacgttcttcccctccaatccaaggtttccgctgttcgtcccagcaaacaccacgcgcgaggaagtcgggcaccagatcgtcgtttgtcccgacctcacgccaaacgaaatcgcggctgattgggatgctggtttccgtgaacctgcccaaacttccgacgagtcttcgggtcctgagccaagcgagcctccggcgtctgcagctacttctcacgtggctctcgacaactcggaccacctccaggtgctggcgcaggctgcagcttctgctgagttgcaggatgacgctcgcgaggatggtgacgactaggaacggtgagtcttcgggtgcaggtgtttcttccacccaagctgtttgagttttcacggttgtagtcgtaggtgcgttcagcttggggtatttaggttttcttgattcttcttccagatcgtcacgtccagttttcaaaaaaataaaaatcatgcaagtcttctgcagtaatcgtcttcctctgcgtttctgggctgcattgccccaggtacaggtcaccatcttccgcagtagtcattttcgtctaccctcctgggctgcgttgccccaggcgtagttcattatctttgagttgtcgcgagcgagctctaatcttcgtccgcgacctgtaccatctgaaggcgttcctcgcttcgcttgcgcctcaggtagtcgttgagaagacccccacaggagaggtgggtgactggttcccacgtgggctcgtcttgatctgcccacttgatcttgaattcacgcactgagcgtcccgttcttgttgacatgggcatccgatcatccagaatttccaacacttcgctctcaccggccagactatcaggttcccagctgtcttcggggagtaatcctcgtcgaagtccagccgtgagtcttcggtgatgtcaggcgccaatcgagccttcgggcggtctttgaattcactcaccggcttcaaccgcgagacatggactaccgggtaaaaccgatagccgctccggttcggcaactcgagctcgtaggcgtactcttcgaccttcttcttgatccggaacgggccgtgccagcggtgggccagcttcttggtcagccccggcttgacacgttccatatacagccatacgcgactacccggctcgaatagagacatcggcgcgttgcttgaggggtctgagtccgcgtcctgattggttggcgttgctgtcgaccacttgttcctgccagtcgtcgggatggttgctctctccttccggctcagtgcttcgttatgttcgcgggctcggcgggctttttcagtcgcttggtattccttggtcatatcgagtgcaatctggtgttgtcggttgacgtcccggcgccacgccagcgcgtcgggttgtctgctactgcccctgcggagcgaggacgacatcgctttcaacgtcgactgagcgtcccatccatggacgaggaagaatggagtttccttccgtgtcatgtcttgtgagttgttgatcgcgaagaccaaccgttccacgatctcgtcccaatcctgctgaagcgggtcttcggcgtacactctcacggattgaatcaccgtctttaccgacctctcttgctgcccgttggcttggggccgataactcagcgtagcccgcgaccttgactgcatcatttcggcaaaggcctggaacacctcgctcataaagcgaggatcccggtcgtgtctaaccaacgaaggtgctccgaatcgtcggtatatacactcttcgaaagcttgggctaccttgagcgctgtcgtgtccgacattgccttggcgatcacaaatcccgtgaacgcatattggaacaggaggagggcagtgttgcctctccgagtcatcgggagcggtatttcgaagtccatggacacaatctggagtggtcgccctgccaacacgttaccgggagaataccctcgcaactgtggtcggcgtttgctggtgctgcagtccgggcacgacttcacatgcttctcgacgtctgtgtagaggccgaaccaatagtatcccgcttgactcgctggtaggtccgcactaccccttggtgcccgccttctagcgagtcatggcagttctgcaacacttcttgaatcatcgtggtgggtaccacgagacgcagcttgatctcctcttgctctccagacgtgtctggacgactcgaattcacattgtagagtactccgtcgtcggacagaacgaacttgtccgcaattttccaggcatctcgtgcagccctgtacccgagcttctcgacctcgcctcggaggactgttttcaggtttccccaccgtagttcctcgtcctgagcggctactatgcgccgtcgcctctccgcttggacttcgacggggtcaatgtcttctgcgtttggcgctgcaggcggtgcttgagctgctttcggtggtcgttcatcagtgtgctctttgtcggtttgaggcatcggcttgggtggcgtctcgttcgtactgtcgtccgcaaatcggattcgcttcgtcttcgatctagcctgtgaacgagtcatcgccatgatcctgaaaggttctttgcgcacgaaatcagcgaatgtcctgggtttggtgacctcgtatccgtccgcaatttgaatagagcctccaggaacatcgttttgcactgatgcttcatctggcgtcgactcatagatcacttcctggatgcggttcagttcgcagagctctgccttccgagtttcactcaggaccaccttcgacgtcttagattcaagtgtttccgacaccaatgagtctgcggctgcattgaattctcgaaccacgtgcaggtacttgactgaccgcagtcgtgccgtgatttccttgtggcgactcagctgagtcatcagcgactccttccggcatgcgatcacccctagggattgctggatcgcgagcctcgagtccccgacgatgaccaagtcttcggcgccatggtccaaagctgcaagcactccgttggtcatgccagtgtactcggcgtgattaacagtcgtcttctcgaggtaagcgctcgccgcaatcagtattgtccattctggtaggcgccacacgatccacgaacaactgccatatccaccatacttctcggtcttcgcggagccgtcaaaggagaccacaaaccccgtgtgagtcttcgggagacgtgcgtacaggaggtttgggtccatacgagtcgtcggcgggcctttcgtcggtggagcaaccaggtccagcgagtcatcgaggtccacaaagttggttaccgtcgactggggcagttgtgaaaatacgcagtccttctccttcacgcgctggacgatcaagtgccacggggaaagcaacacggcgaattgcaccgctctcccgaagagtgacttggacttggtgatccattccaacgtagagaaccgcgtgtacacgcggatggtccgtcccgctagctgcgtataacaggtcttcaggagctggagtagagcaaacacctccatttctgcaggatggtaattcaattctgcgttcttcaagacgcgaccacagaagcgcacggggagcagtttgtcgtcgtgcatctggagctatgtcgagctgagtgcccattcgttcgcgtaaagcatcacgtgcacgtccttcttcttatcgaagtgccgaaggatcggcgccgccgccaccttctgctgaagtgcttggaagctgcggcgggctacagcgaggccacccccgggcgcgaagtcgtcgtcctcgagctggtacagcgcggctccatagactgcgaagtcttggataaaccgcctgtagtaattcagcgctccgaggaaggactgcatccccttttttgtccgagggaacgacagcttcgtgattgcgtccagtttcttggggtctgcgcgcatcacatctagcgagatctcgtgcgacaggaaatcgacgcgtccttgcacgaatatgctcttggtgaacctgacgctgatccggcgctcctcaaatcggctcaagagccggtccagcgtggcaagacagtcttcgaagctctcgcctccgaagcatatgtcatccacaaatgatcggcgatcaaacaccggaaccagtgacgagtcgtcgggctcgttggtcgcaaacatgtccgcattcgggctgttgatcagcagcaagacaggatctagtcatcgtgggcggctgcaaacttcgtgcgggacgctgcggaagggttctgcaggtatcccgacgactcgagtcgtcggatacgtgctgattcggcttcggcagctcccatccgttccgcaaaggccttccaacctcccttcggctggacatgaccccacaacgcgttgtcgatcatgcgctggtagatcatcggcgcgttcttgaggacgaaaggcatgcgaagccactcgaaatgtcccagcgggcagacgaaggccgagatctagcgcgctcgtagcgtcatcatgatggcccagaatccactcgcagcgtcgagtgagcagaaccagaggtatgcttctggtcggtcaacaagtcattgacgagtggcatgacgtattccatgattgctgtgatggcattgaccagcttgtagtcgatgcacagtcgaatgtcgatcccgttctttttcaggacgatgacgatcggcgatgcccacgggctgtcagagaaagacacgagtccagccttgagcagccccctcagcagctcatacagcttcttgagatgcggggctcgttgcttgatcggcgcgtgcccttgcacgtctatgtcacagaccaccccatatgctggtggtggtaacgcattaccgcttgcgatcataattggctcatggttcttgagcaccttgattagatcgtcctgtcgtgtcgccgacaactcaggattccgcacattgtctgcgtcgtagtccagagtggtcgtagcagcttcggacaagtcaggaaggaacgccagctcgtgcgcgtagtcttccaacccgataccagccgcgagatgctcgaacgagtcagcggcgtcgtcattcgcggtctctgaaccttctgtgctcaagacccgcaagccacacatgaacgtctgagagcggagatgggagacgaagagggagaggtccaagtaggagtaggaaggcgccgtgtgatagagtaggaaggtacgctaagcggggacaacgagcggaggttgagccgctcgaccctcagttgcggtttatcactggtccgtggtgagtcaagactatacacacaagttgcgccgacgcacaggttcctacgctagctggttctgcggctcgagggtggtcggccaggagcacgaaggagtaacaacgaaggtaggcgaaagtgacggacagtgcatatgaggacgacgcatcaagtagggtggcgggatccgtggggagagaccacgggggcgcagagtacagtgcagtcagtactctggccgtgagagataacgtctccgagcgtcgggttcgttcgatggcggtgacggacgttgtctcgcccacttgcatgtccggcgggagccgcctggggcttgccggaagcccaaggtgtccatgtagctccctcccagccgtccctattcccgagacccgccgtgtcgttgacgggtcagccggcagctgtctgatggtcgtaagcctcgcacttgttggcagtcggcgttgaaccgttgacctaggtgtggacgtggtgactagtgtgctctcatgcaccgagggcgtgtaaggaaatgggaattgggcttcgggttaagccgagtaaactacaagggttcaatggtacacactttctcggcatgtatattggggcaaaatacggctcccagcaattgtagaggcaccatgtgctttcatcaccaatacataatttgttgcgtctgttctagtgtttaacccaccaggaaaataccgtatgaatctcggaaattgacgccactgatattactgtacaagctgtagacagggatttatcccaaacacaaagttgaaagtgcctttggtgatcgttagggatattaatactacagctaaattactacctattggaagatacgaaacgaggctgaccgtgttctcccagacaaaatcctgcaatgacgatccatgaacaacatggctcttttatatattgtggagttaaaagacaatttatagcaataaccataatttataaaatacacaaatcaataaataagacacatagccaaatctgtaagaaaattgatctaaaactaatatagtgttttaccttttcatatatggtaatggttactatatcactattcatactttatcatattacgatattataattgcattagtttaacttactatcgattgataaagatttaatattggaagtcgtgttcttcggcgtgtgagttcgtcagatcattgtcaggtagtagtatttacttcagcataaagcgtcgtgctgtttttttccctgtgcactggcgcaactacaatcctcttcgtgcagcgcggcactattacacatacactacccgaatgtttccaaaattcacatgtcttcacgactcggcgaacaataggaacgtgaaagtcttatccggaaccaccccacaataaattcccgagggctgatacattacgaccaaaataactgctgcaatctcaaggcaaaagcagtgagtgtggctggcggaaccgcaacgtaggtgcatgatggaccatcatttgaggccacccccccccaatttatttcttgtctgcctggcaaaaattacttgtaatttactgaaacgtaaaagcacaaatccccccagctccaatccccggtgctgcaagaggaccgctcgcattgatcaagaggtccccgaataagatctatacgataagaatttaggtgcaacttgctccgtgcaagcacgagatctctccatgatatctcttaaatcggtttgcggcttcatctcacacaaaccgcggaaggtccgacgtcaatggcattgatcaaacgctgtagaggctttctaacagatgtccaaaaagcggttctcctagactgtctgctaacgagcctggtgcttgcccacttgtcaatttcctacctaccctacaagaaagacacagcaagacacgatgcccaagaaggactggttcgcggaaaatccctacccgggtctgcgcctgtcggaggacgtcaagcaccagttgggcgacctcgtgaacgagttcctggaggggtacttccggaagtacgaggagttcgtctccatcgacaaccggcgggtggacgagcagcgctggaagcacctcaagtccaagaacgacctgcacgtgtacgaagagcgctgctgtcgggagagcgaggctaacatggagccgtggaaccctcggacttcgcagtgcagtccggcttcgacaaagtcggctatgcctgcaatgctgcgagtcggaacggttcccggccgcctggacgacctcatgttcggtgtcgtgaacccgacgctggatgcgatgcgagtcagggcctcgtacgtccacgacgtcgacgctgctgcgatcttgtgcccgatcgtcgagcccagcaaggaagagccgttccgttcgctgattgtcaagtggctcgccatcgacaacccgttcgagtccacgaacctcatgaagacgcgtgacctcgtgtacgtcgaggcgactggcattctccacttgtctaatggtgatcgggtcggctaccacctgaagcactcgatcgagttcccgcagacgaagccgcaaccgaacgtcatccgcgccaagctgtcgtactgcagcttctaccgccagatccacgccaacgtcatcgacgtgttcggcactagcacgatggtcccagggggcaacgttcggcgcttcatatcgactcgaaccgcccgccacagagagcctcctttcaacacctagccttgtgcgttgtggccagatgacgaaaatgtcgccgatgctgcaacaagacctctcggttggcttgcaaagctgacgaagcaaaagctgcgtcatgtgcaacaagctgtcttgctccgggcttattggaagacttgggaagtgtacgtgtaacctgtgctatggctcggtgtgctattcgtgcaagatcaactggcgtatcaactttaccacgttcgggagtaagccagtgcagcgcaaaattacgttttgcggggcttgtatcaccagagcatccatctgcgacgcagagcgggttgctgagaggccaagctacaagttgcagggtctacaaagccttatctaccgcctcccattcgggcatggcggcggcttcggacttcttgatcgacttttattctgacccgacggaagtgtcagaaatttgacaagagtgtgtgtatttatgagtacccagtagtaacggtctgaagctattgcttatcaattaattgcatgttgtaagttggagaatctccgattattctgttctagctcgtagtagtttgacgttcagattcttcagccgccggacggaggccattcccgaatttgctagcttcccacccacgacgtccgagatgttcgaccaattccaatgtcctatccgtcaaccacaatatcgcccacgctttcggattcgacttcaagacgtcaaaccttgccttcaccttcaataaccgctgatagagctagctgacactttcaccaccattcttgctacactgcgtaaactagcgaggtgtaaaaacaattccattaaacaatgctgctttcatcctggacgggttggggtgtctccctcaagggaaaacgcactaacgttcacaatacaaatgctgctttccgtttattcaccagctatctcccaacgaaatttatcaacaaagcagtacagtgaaagcttgtgtgcaagagtagaccgcgtttcgaccagaaccccaccatacatatattgtctatctgttagcttcaagctctcgcttcaaaattgctcagcataaacagtgtttattaaacactctctcgaactaacaaaactccaccaattctccgcagcagcttcacttcactactgctcataaacatttgcttcagacacattctgacacttccgctgggtcaaaatgcgagtcggccgaaaattccgattcttccaccgtacccgaatgagaggcggtagatacagccttgtcggcgcggcaccccgtagcttggtctctagcgacctgcttggcgtcacagatcgacgctttgctgatacacgtggcgcagaatgcgatcttacgttggaccagcttctcacccagtgcgatgaagctgatgcgccagttgatcttgcacgagtagcacacagagccgtagcacaaattgcacgtgctcttcccgagtctccccatgaacccggacgaggtggtcttgctgcacatgacgcagcatttgttctgctctcgttgaaatcccacggctgagcgttgctgctcgaggatccacgacattttcttcatctgagcgcagaatacgaggttcgaggtcgaaaggagagtctcagccgcaactcgagtcgatatgaagcgccgaacgttgccccctgggaccatcgtgctagtgccgaacacgtcgatgacgttggcgtggatctggcggtagaagctgcagtacgacagcttggcgcggatgacgttcggttgcggcttcgtctgcgggaactcgatcgagtgcttcaggtggtagccgacccgatcaccattagacaagtggagaatgccagtcgcctcgacgtacacgaggtcacgcgtcttcatgaggttcgtggactcgaacgggttgtcgatggcgagccacttgacaatcagcgaacggaacggctcttccttgctgggctcgacgatcgggcacaagatcgcagcagcgtcgacgtcgtggacgtacgaggccctgactcgcatcgcatccagcgtcgggttcacgacaccgaacatgaggtcgtccaggcggccgggaaccgttccgactcgcagcattgcaggcatagccgactttgtcgaagccggactgcactgcgaagtccgagggttccacggctccatgttagcctcgctctcccgacagcagcgctcttcgtacacgtgcaggtcgttcttggacttgaggtgcttccagcgctgctcgtccacccgccggttgtcgatggagacgaactcctcgtacttccggaagtacccctccaggaactcgttcacgaggtcgcccaactggtgtttgacgtcctccgacaggcgcagacccgggtagggattttccgcgaaccagtccttcttgggcatcgtgtcttgctgtgtctttcttgtagggtaggtaggaaattgacaagtgagcaagcaccaggcgcgtttgcagacagttctgggggcctgcctttagatctattggaaagcccccgcgccgtgatcgacatcattgacgtccgacctcgggcggtgtgtgcaagcgaccgagactggtggttgtgagcacggaatctgaaaaggcgctgaccggtatattgaagcgatctcgtgcttgcacagtgcaagttgcacgcacctagttcttaccgtacacagtagatcttattcgggactcaactctggatcgattcgagaggtacctcttcgcagcaccggggatgtgagtcaggcagcttgcggggatttgcacttttcggttctcgtaattaattacttgaaaattatgaactggtaaaaaaatattgcattcgtcggtgacgaagctccgatgcctccataaaccaaatcaggctactcgaaaacacaatggaccagccgcagctacacatgcattacgtcctgaaagaaaagcgcgagccactttgatcgtaatttattggtcgccaagaatttatcgtggggtggcttcggataagattttcccgcttcgtcgtaatattgtgttcgctgggttgtgaagacatgtgaacttcagcaacgttcgagtggtacttttactttaccgcactaagtaggtttcattctgtaacgtgcatggtctaagtgggcgcaatgagaaccagtaattattggtccttcgttccagctacttgcaggacaaacaatgcatggtgccggtttaagccgctacacacctccagcagtggtctagcatttcgcgatggatctgctaagtctagtagcagcttgctaattggttcgcagtccaagcactggggacgtggacgccagattttagcgttaagaaccagggtcataggtatcctgcatcttaatacccaccaattttgttaatacgtctctgtgttcattggccacagcgttctccaaacaacaattatacatacaatttttctgtattcccaacaagaaaacttgtgttaatagaaaataaaagctttcataatactaaaacaatgtgtctggacttaaaaatacattttgcgtaaattcaaccttaccttttgatactattcatttaacttaattaattattattggaacatattttgtttatacaacttttttaattagaattgataaatttagtgccgtagaacttgttgtatgcacctcgacttcttgagtctcatcggttatattggagcgtctgacggagattgtgttccctggtattctgtggcgtttgaatactgagtggtggcgcgaaaggtagcacgaatctgccttggcgacgtatccttacagtacagaattgaagttttcgattgtttgggcagtgcccaaacannnnnnnnnnnnnnnnnnnnnnnnnnnnnnnnnnnnnnnnnnnnnnnnnnnnnnnnnnnnnnnnnnnnnnnnnnnnnnnnnnnnnnnnnnnnnnnnnnnnttcagtacagaattaagttttcgattgtttgggcagtgcccaaacaatcgaaaacttcaattctgcccaatgggcactggcacaaacaggcgtagcgcaaacagatcaaacatgagggacactttgtcaaattggctaagcacacggtggactggggcgtcatcgggtcagtaaggggtcactgttgcatgtttccccgctggaaagtgtagaagtttcaagtgacagaggctcgaacaacatatggtagaatatcatcaaatctccgaccgcacttaagatgataggtatacaaatccccagtcaagcgcggttggagcataacagtatgaccctaccccttcccaaagtgttatgcatacacagtccaagatagattagtcgtcccgtttgctcgagccttgggatggatggcactgagcgagcgtagcgagcccccccctgcggtttgacagtccgtgcgcgtagcacgcggctgcaaacccaggactcagcagtgctctacctagcaagcggaggcgacgcgtgcgagccgcagcgggcttagggttctggcccagcgagcgcagcgagcctataggggttttggattcgcaaaggtgaccccctcctatccgcatgttttgtgtacgagtcggagaaagtcggagtgtcggaggtttttgggtatggtggccatcactatgcgatcatgcaaagtgagggtttccataccaggcgagtatgaccacatcttgcacagcctccgcatccttttggtaccagggccttagggggacaatgctgacacaaaacagcctaatgtagttgacctctctcccccggaccccgggcactaatgtagttgacctctctcccccggaccccgggcagtaagttgggtcggcgtcttgacggtcctgagagagagatgcacagaccgctgaactgttgacggggccgtcgagattgcatccctccgcatggtcattgagtaaacgacagtggcgtaccctctaacgccacatcctgatggcattaaaacaagctaaatggtactgtacctaaacgaaggtggtcatcaatggtgaccgactcaaaatgcaaaaatctatacatgtaggtgcgtgccgacaacgttggtccaacatacgatgtaggagcccgcatatgactgtaaattccgggcttggtgacgctttctgaacatagcccgcaaagtaccactggctgactttgacagttcgcgagttcgttaaaatcttcgactaatgcagtacaatacctttgcggagtcaacttttgcagtgagttgattcacctgactcactttagatagtgtaaatttcaagttgcgcagctctggagggtacaaccccagctggtagtggataagaactttggcatctgcgctactacgccacccttctcacaaacagcttgtgcacgtgctaatgtcaatctttgcctaagcagccgatgcaggccctattgagcctggagacttcacttgccatttccacgcaaacagagcacaactcgcgatgcgcaaggagtggatcggccagaatccgtacgcagagatgaacttgtcggcggaggtgaagcaccagctcaacgacctcgtcaatgagttcgtggaggggtatttccagcagtacgaggactttgtcgccttcgaaaaccgtcgagtggacaagcagcgctggagacatctcaaatccaaggacgacctgcacgtgtatgaagaccgcaatcgtctagagagcgaccaggacatggagccatggaaaccaagctcgcagggtggagcagcaccggcgaagtcagacatgcccgtgctgctacgtgttggaacggttctcggccgtttggacgacctcatgttcggctgtgtgaacccgacactcgatgtcatgcgcatccgagcgtcgtacgtccacgatgtgcacactgctgcgatcttgtgccccgttatcgagcccagcaaagaggagccgttccgttcgctcatcgtcaagtggctcaccttggataacccgttcgagtccacgaatcttgtcaagacccgcgacttcgtgtacgtcgagggtacgggcattttacacttcgcgaacggcgaccgagtcggctaccacctcaagcattccattgagttcccggagaccgcgccgcgccaaaatatcatccgcgcaaagatgtcgtactgcggcttttatcgccaggtgaaggacaacatcatcgacgtgtttggcacgagcactacggttcctggcggagatatccgtcggtttatagcaaaccgagttgcgacggacagtctgctgtcgacgaacaatctcgtattctgcggccagatgaagaaaatgtcgtggatgctgcagcagccacgcaacgtgggtcttcaacaagagcgaaacaaaaactgcgtcgtgtgcaacaagaatactgcttcggggatcagggggaggatcggcaagagtacatgcaagctgtgctatggttcggtgtgcttttcgtgcaagatccactggcgtatcagcttcatcgcgcctggaggcaagctgattcgacgaaagattgcattctgtgcgacgtgtatcacccgagcttcgttctgcgacgcgaaggaagctgctagagaccaagctacgggatatcggccctacaaagtcttctccacagcctctcactcggacacagcggaactgtccgagtttttgactgattctcgttctgatgtagcggatatgttagattgggagtgcttatgagcggaatctgctgagtgtcgtttttagtttgtgagcgcgtagtccgatgttaagaattttcagttttataaaatttgcacaaactaaactttgccgaagtactgaggaaaccaaatgaaggcgccaagatacacacgtttgctagtgtaacagtttatgttgatcgtttgaggagtggagcaaacgataattgcgtacctctcttaaaacaaaagtagagatctccggtttcagcagaacgtactgtacgtgaagtgaatgaaacagcatttcgtatgctagattcccacctcatcttcagcgcggcaacatattcattaacgttataaaaaattcattctgaggcagcgggaatttacaccagatttgtttgtggtctaattcgtgagcttgctttgattaaatgttcgaaatatatgttacggaagcacccttctcttattcggctggtcactctcgctacagtcgtttatgaaaatagcggccggatttaatgacgatatatttatcgaaccagtattgtagactatcaataatacgtcgaacttgacgtggcaacgaaatccatgtagccatcaaaagattctggcacgtctaaatataggccaccaggccaagtatctgggctttcacactcattgaacatggcaagtgatataatggaaacacagtactctagtattatatatatttaattattgcttttgaaatgttaattatattatcatatacatatttttattgatactgtagcttcaattagttcaacggttgttattatatataatcctttttattcaatattttatttttaaatattgaattatgatttcaccaacattataaaaaactaaacatgtgtttaatattgtatacttaagtaattgctatctcagtgaaatgattattgacgatttttttaatgcgccaaccgccgtcccgatattatactgtagccgcgtggtggcagggcacagcaagatgtgtactcgcgaacgttgctgagtttcacatgtctgcacaactcggcgagtgcaacatcacgaaaaaacaatgaaaatcttatccgatgcaccccgttaaattttataatagatttccaactaatttcgtgttgttttgtttgttcgtagttttttttagttttgcaagcagccttgcccacgtttcattgtgttgagattatccctcactacgatggtacccactcaacataatgcagcgaatcaggcgacccgcactttcataaatttcacgtaatttacgaggcatgaatgcaaatcccaaactcctctttcgggaagcattccccggtgctgcaagaggtacgtctggaataagactgtcgagtacaagcgcgttgcagatcctttcgccataccgctatctttgcagcttacgcacggcgcaaagactggcatcaacgatagggatcacggcgcgacggccgtcataccggtacgtccaacagatctaagctcggctcaaacgggcctggtgcccacgctcacttgccaatttcctacagtgggagcacaagacacagtacaactgagtatgacgaaggactggttcgctgcgaatccctacccgaacttgcacctgtcggtggaacaaaagatcgagctcgtcgagctcgtgaacgagttcgtggaggggtacttccagaagtacgaggacttcgtcgccatcgacaaccgccgcgtggacgagcaacgctggaaacacttcaagtccaaggacgatcttcacgtttacaaagatcgttatcgtcaggaggccgagcaagacatggaaccctggaactcggttgacttgaatgaagacgcggcgccaaccaagtcggatatgcctgtggtgctgcgaattggaacggtgcttggccgtttggacgacctcatgttcggctgtgtgaacccgacactcgacgtcatgcgcatccgagcgtcgtacgtccacgacgtccacactgctgcaatcttgtgtccggtgattgagcccagtaaggaagagccgttccgatcgctcatcattaagtggctcacactcgaagaacccgttcgagtccaccaacctcattaagacacgcgactttgtgtacatccaggcgacgggcattctccactttgccaacggcgaccgggtcggctaccaccttaagcattcgatcgagttcccagtcaccaaaccgcgaccgaatgtcatccgcgccaagatgtcgtactgcagcttcttccgccagattcacaccaacgtcatcgacgtgtttgggaccagcaccatggtccccgggggcgacatccggcgcttcatctcgattcgagtagccacggacgctctgctgtcgacggccaacctcgtgttctgcggccagatgaagaagctgtcgtggatgctgcagcagcaacgctctgtgggtctgcagagggaacgcaacaagaactgcgttatgtgcaacaagaacacttcggggatccgtgggaggttcggcaagagcgcctgcaagttgtgctacggctccgtgtgcagctcgtgtaaaatttactggaccttgagcttcatcacggtaagttagtgcaacgtaaggtcgcgttctgcatgacatgtataagcagcgcttcgatctgcgacgggaagatggcggcgacgggggatacagggcctaccaagccttctctacaggctcgcattctgacccagcagactcgtcagattctgagtgataaccggcgtttatatggtaacctccagaaggggtcatatacggtacagatctgcttttggaacatatgacatttttgcgcggatcggctttgagttctgaaaatgcacggaagcacgtaggccacgtggagccttggccggcgaagcgcttgtatcggcgagggttcatttggtaacatgcagacgccagcgcagtctctcccgggcactgcaggacctccaggcaacgacggccctctgggcagcgccatacccggccgtacaaggggttcagtgcggcaagaggtcagcccgtgctacttccgcggctatacttatacacgtgcttgggcatcctccaggaaaatctcctaccgctgcagccattggcgccagggctgtcccgggacgatggcgttcttcattggcaccatggggtacaccgctggccgcccccacacttgtcgcaatgtcgatgctgctggcacgagcctcgtcgacgtctccagtgctatgaaggacagagtcgacaccctggccatcgaacaagtcgcgcttcctgcacgtcgcatatgggaagctgtgcggagcgagttttacggagctgacaacgagcatgtcgtccgcgggctatctgaacctcaagtgcttcgccgtgtgtaccgagcaaggagccagcactttagcggagacgtgccggggccattgaaattccgccactttcaacggcgctgaacgaagctgtctccttcttccagtttcattacgtcacagtgaaccgcgagaacctcagcaagcctacccgactcattggctgggcacacccctccctcatcaacctacttcgctacaacgggactaccatttttgtcgatggtacatttcgctgtgtaccccctgggtacaagcagtgtgtcatctttatggtgcacgaccgagcgtccggactatatgtgccagtctactatgtattgagcacttctcacagtggcgattctttctgggacatagaactgcgtcatgtgcaacaagtttacagcgtcgggcatcagggggaagttcggcaagagtacttgcaagttgtgctacggctccgtgtgctactcgtgcaagatcaactggcgcgtgagcttcatcgatctcggtggcgagctggttcagcgtaaaattgccttctgtatgacgtgcatcagcagcgcttcgatctgcgatgcaaagagggcggcgagggaccaagctgtgggttacagagcatacaagaccctctccaccggttcccaatctgatacatcggaagtgtggaacgtttcgatcggctcccagtctgacccatcggaagtgtcagactgtgactaaggaaaacatatatgatacatagtggtttgatactgttggattaggttattgttgtttgagcgccatttatatcatctctcgttttatagatttttgttgcgcttagtaaaggtttacattcatttttcatgtcgtacaaccgggtcaaccaacttcagatgaaccggcacaaaggatcctcctgaacctcacagtcaattgaccagatgaagtcgctcataagtacgctgcagttcgttgcacaattcacgctttaagagtctaccatactgttcattcagacaaatcatcagatctaacattcgacttggttgtgccgtttcgttgttttaagaactttaaaaagtagtagtatataaccacggtagtagacaaccttaggctcctagtgtccctgtaggtaaggctcacgaagatcaagcgttccactgagggttcgagtctcgcccggagcgattccgatacaaaagccacgtaagtctatttccgacccccgactacctccatcactacatctcctgggacccctaagtcacccccccccccccctaaatggaacttccgataaacctctgtagccgctgggtacccagtgggcccggtcagcggggttgatgcagagctcgccctgagtgcaatcggcgataaccgcataaaaataaaaataaaaaggttaatgactatcttgatttcctgttgtttacgtctaagtattgcctaaatttaagttgtcagcctatttgtattttgcttagctggaacaaggtatctgtacttgttattcttatccttttaaggcgccatcgatgaagatgtttcgatcaagctcatgatgctgatttattattttagcgtattagcgagcatcagaaaatctggcaggttgagagggaggaaaatctgttgctgtggacgacaatgcacgaaccagcatctaggatgaatcgagttttacagtatattgatagtttgcgcatgaaatagcgactttcagcacatctgccgatattaatgagcaccgactacccgcataaccgttatttcttctaggctagtcgtattgaccaacaccaaatcgcgcatccgtgagctgtcgaatcgttcccattgcttagcagcatatcgtcgactaaaatactaattgctttggtcgtggagtcctcgcggattcccacaccgacgcataaatcgaacgaatcgtgttttttattttattagcttctgacagcttaaacattttttgagagctcgagggtgacatcgttctgaaaaaaatattttcgggctcctagttttttgtctcaatatttatttaaactttatacatttatcttatccgaaatatattgttaaaacaattggattcgagtactttccgcgttctaccgagttatttttactttcattttgatgcccggtaaggtacgcaacacgattggtcaactccaaacgcgagttttttggaaaactaaaaaaaaggttcgtgtggcgtggtctcatatttacgtccggaaccgtagcttatcagaaacactttgataacatcgagaaggtcaatgtcggtcggtaccctactatttgcgttcttccgtcttaggcacgctgataaatgagatctcgcatcgttacatacgcgtcagatccctagcgtagcggcccaacgcagtgcaaagtgtaccccaggacctggggcccaggaatagaactcgatcacgccactagaatgttgcgggattccacatgacgccacttgatgaacacaatattgcgacaaaaccaaagtgaccctttcatttcttcacgatgaatacaatagtcggcgactattgtattcgactatccgacaagtttgaattatcgatagagaagcaatgtactgcgctctttgaagttgtccaaaagatgtcaaccgagtcaaaagacgacttcgactgactcaatacacgacagataggcggtgcaatgtgtgctgaacgggcaaatcacagttgcccaatgttgcaggagttctgcagcaggacgccagtcaggaggtacagtacatgtatgtacagtgcgctcagcgcactgcgctgtacgcaagtaaacctcaaatctaggttttcgcggatgaggttcagcaacagaaccacattacatgtacagtacagtacagtcgaagctttgcagctcgcacgcgtgcttcgccattgactgaaggactttttacttactgtccgataaggtccttaataagggttggaagcccataaatcagggtctcaacgagtaacgttacataacgtcgactcgaaggcacaatcgggccatacagtcagtggtgtgggtagcactgtggcgacttagccactcttcccaacgggtctcgatctcatttgacgattccctagcgtagcagcacacgacgacgcacgacaagcatcgagacacgatgccaaaagactgggttaatgcgagcccctacccggacttggacttgtcgggggtggagaagctccagctcgtcgacctcgtggacgacttcgtgatggggtacttccagaagtacgagacctacgtcgctaaagacaaccgcgaggtggacaagcagcgctggaaacacttcaagtccaaggacgacctgcacgtgtacaaggacatgaagccctggagctcagaccaagacgcggcgccgaccaagtcggatatgcctgtggtgctgcgagtgggaacagtgctcggccgcctggacgacctcatgttcggctgcgtgaacccgacactcgacgtcatgcgcatccgagcgtcgtacgtccacgacgtccacattggcgcggtgttgtgccccgtgatcgagcccagcaaggaagagcccttccgttcacttatcgtcaaatggctcacgcttgacaacccgttcgagtccaccaacctcatcaagacacgcgactttgtgtacatcgaggcgacgggtatacttcacttcgccaacggcgacagggtcggctaccacctcaaacactccatcgagttcccaggcactcagccgcgaccgaacatcattcgcgccaagatgtcgtactgcagcttcttccgccagattcacaccaacgtcctcgacgtgttcgggaccagcactatggtccctggaggtgacatccggcgcttcatctcgattcgagtagccacggacgctctgctgtcgacggccaacctcgtgttctgcggccagatgaagaagttgtcgtggatgctgcagcagcaacgctccgtgggtctgcagagggaacgcaacaagaactgcgtcatgtgcaacaagtctacagcgtcgggcatcagggggaagttcggcaagagtacttgcaagttgtgctacggctccgtgtgctactcgtgcaagatcaactggcgcgtgagcttcatcgatctcggtggcgagctggttcagcgtaaaattgccttctgtatgacgtgcatcagcagcgcttcgatctgcgatgcgaagatggcggcgagggaccaagctgcaggtcaccggccctacaaggccttctcaaccgactctcaagcttcggacacggcggaagtatcagacggtaataactagatatgagggcatcgactcgaagccactaggaccccagctggggacagacttgaaagttttgaccttggagatcaagcagaattaaccaaaaatatacctatagatacaaacttcaaagctgacagtgttgttgcaggcgaaaaagcttcggatctcggtaggtaaacgcatattccattgagatacctctaaattatctgtgtgcgtgaagtcataggttgatcggttgtgtttcatcccccagaagcgtcccccaacctgacgatacggatgatccaaccgaggggtggcgattatagttgacagcttgggttcggttctcgacatcgggcagctcgggcggagctatagtcgtcgcctcgctcacacaagccgggcagaaggtaactttgcgctgggtcatcttgaggtccagcgtcacgaagctcatttccttctctactttgcacgagctgcagacatacttgaagcagagcttgcaggtgctgtggtggcccaccagctttcccagtcgtcccaatgtttttttgcagccggtacaatggtgatcggggtcccgtgatttccgcgtcttgagctccgcgtagcgctcgccaagggcctgagtcaacttcttcatttctccataggacgcgtacttgagcggagccagcatcgtcttcacgaagcgcggtactaccactcgccggacgccgtcgctcattgaatccatcatccccatcatgtagaccgacacggacgactcgttctcctggcggaagaagcagcacactgatagcttggcgcggacgcgtccttctaggacgtgagcttgggggaagtccacggagtgcatcagtcgatagcccagacgcgcgccattctgcaacagtcgaatacccgtggcttcaacgtaaatgtagtcgcggttcttgacaagccccacggatcggcggcggacatcaagctccatccagttcacaacgaccgagtcaaaggggttgtcccttgttggcgccttcgcgatcgacagcacggccgcctcgctgcgctcgtcaacaaacgaggatttggagcgcgtagactccagtgtcggactcacgatgcccagcatgacatcgtccagcgttccaggagtggatccaacgcacagcatcgactgcagctcgggggctccgtcgtcctccgagctcgactggaaatgcgatcgtcgccgcttttgtcgacgttccgcgtacactttgatttggtccttggacttgatgtatttccactcgttcgagttcaccttgcagttctcgacatccgtgaagtgctgataccgctccagattggcctcgaggatggcgtttgcgaccacttgaagctcgctgatgtcgccgggggcgagcgtcatgcgcctcagtgggctggcaacttctccttttggcattgttcagtggtgccgacggacgagaaaatgcacaaatggtctccgactcggtgcagattgtcaacaaaggatagccggaagttaacgatgtcgcccatccatgcatgtaagctacaccgccatgtggaccgaaggagcaagcgttgctgggacgcctgcaacttcatcgccagccggtcaatgattgccgccgattcattcaggtgctcgaaaagtgaaggtggtggatcgcacggtacaatcgaaggcatagtcatttaccgccccaaggtagtgtccgtatcaatccaggcgtacttacaagttgataggtgcggtgcaatacatgtgcatgcacgctggtcattgcaaagatacctggagttttgctacacacgcactcaaccccacaactcgtgtgattattttgcgcgatatgcaaccgaacatacgattcctgaaatgcagattggttttcgggaactgtcttcactcgaaatttacaagtgagccaaatggcacggcagcttgagtcagtcaggcacggattttctgcatgcaacttgtccaagttggacttgcaagatcgggggagatctgcgtagcgtgatatcacctcatgccaaagtcccctaggaataaagacggaaacctaggttcctctcagcaatagtcctgtcaaccttaccttacacacctccaacctcccacaggttaaggtaaggttaatctcaccttcctaacctccctaacttcccctttacaaaactcagtataatggaaaaagccgggaccaaactcccagccaactcgggctcggagctggtagtgggcgtacagtaccttgggcgtggctgcagcttccagcctgcacgaacgcagcatattgcaggacagatttctaagcctcaccgtttgatctaccaataatgtgaacttctacagtgtagtagtaaaacaatattgtacctttccatccatttacttcagaagtacaaacatgtatcgatgactacagcgatctgtccaagttgcggaggatgcgagtgccgctattaacgtcgatcgtagctctttaagacggtggtgggtcatacctgaacctgtgcctctgtacctctgtacccgcgttcatataaaacgagaacgtctagccttcggcttaacgaagccttgtcagcgtggcaggaggctagatgttctcgtaggcaacagtggacagacgccagtttgctgaagaaacactatcgacatgtgcgtggcgctattattcagcgcgtcagtggggaacggtgctcgttgatcatccaggtcgaccacttcaggctccaatcgagccagcttgaggtaccgtagtgtcgttaaggaggttaaagcgaaagtttagaaagtccagtgagtttggaggtgggttaaggttaaggaggtcaatgtaaggttatgacagctgaggttgacaggactactcagcaaataccaatgttttggtcctaatattgtacaagatatcgatgttactgccctaatattttacagaaacccatagaaatccctatcaaccgtccatttaatacgtgtagtttgaagcactcttcggtcgagtgcctcctatcttgtgttcgcaaagtcgtaagagattgctgatgcctcgttgtccaggaccgtgccccaccctgatgaccataccgactcgtttcgtggccgggggaatccgacaagtgcgtgactccagcaattgctcgcgttccgcatctcggacggtgtggctgtcagcgcctcgctcacacaggacgagcaaaacgtgactttccgttgagtcatcttcatgttgggactcatacagctgagcttcttctcgatcttgcacgagccacaaacgaacccgaagcacattttgcaagcactgcggtggcccatgattttgccaaagcgccacacccgcattggcttcatgcacgtgatgcagttatggtccccgctgggaggctcagcatgcttcgactccgcgttgcgctcgctcagagcctgcgagagcttcctcatctccccgcaatgggcgtacttgactgtagacaatagcatcttgatgaagcatggcgccacaacgcggcggatcttgtcgctcatcggatccatgattgccatgacgtagacggccaccgacttatccagcctaggctggaagaaggagcacaccgagagcttggctcggacgcgaccggagaggtcgtgggcttgtgggatgtccacggagtgcatgacatggaagcccacgctctcaccgctgggcaggttcttgacgcccgtagcttcgacgtagacatagtcgcggttcttgacaaagcccatcgatcggcgacggacatccaactccatccacttcaccgctgaagatttgaacgggtcggctgcggtcggttctttcactgttgagagaactgcagctccactgaggtcgtccacgtatgaggccttggttcgtgtgatctcgagcgtcgggctcatgactccaagcatgacgtcgtccagggaaccgggaatcaatccgacgcagagaatcgactgcaggtcagcttcagacgtcgaggtgcttgcttcaagtcgagagggacgccaccgccgtcgacgctctgagtacacacgcatctggtccttggacttggtcagcttccacgcgttcgggttcaccttgcggttatcaacgtcccaaaacagcagatagtgagccaagttggcatcgacgatgccctcggcgacgacttcgagctcgctcatgtcggcaggcgtgagagacatccgtcgaaacggactcgcgaactttcccttcgccattgtttgacttggcaggcgagttaatgagaggagcaattgaggaatggcctccctttttcgttgggcggtgctatccaatacgtcctggttattcatgctccggtaacgatgattgccattgaactcgaaggtgtcgcactgagtttcgcatcgcgctttcgtgcggatccgagaccttcaagccaaaaagttgctaacatgtgctatctggtggccatggtgaaggcttcgtcgagaccaggaggttatgtaggacagcagcctctcccagtatccaccctttgacagatgctccttggtttcgttgaggtttcctaacaagcctcaagtcactaacttgtcgcgaaagatattatatttggtaagctttagaattctttgacctcgcttggcggggcggagaactaagttacttgatgcgggatacaaacttgtattggctgagctgttgaagtgagcccttctgcaccatagctcggatcgcgcgttggatagcgttggggttgtagccctgggcctcgagtcgactgtacagcgcactggtctccacgcgcgtgccaatacgcagagtgcggttgatactctgctccacctcctgtgccttctcgtggaacccgccgaatagtccttgggtgccgccgtccttggcggcgttcatcgtactcacactgaacaaccggatcgcctcctgcacgtgctcgcgcgtggcctcattgagtagacgcatcttcgcgagagactccgagatacgcacaagggcttcgagctgacgcactgtaaccggaatcgtggtttcgcctccttgggtacgacgcacatcgtcacgtacgccaacgtagaagtcctgcagcgcctgtgctgctccaaccgacaaccgtggtgcacagcgcgtgcggcagtacgagacgaactttttcagcagccacggctcgaactctccaccactggacgcactttcactggccgagggctttcccgccgccgacgcgagcgcgttggtgtgcatccgcacgacgtgagctgccatcttcctgtctcgcgcgtcgtcctggatatcgcgcacgatgaaaatcatatcgaaacgactcagaatcgtgctcatgaggtcgatattctccgaggcagagcgcatatcatcgtagcgaccgaacacagggttagcagccgccagtacgcttgcacgcgagttcagaatggtagtgataccagccttcgcgatagaaatcgtctgctgctccatggcttcgtggatagccacacgatcggactcgcgcatcttgtcgaactcatcgatgcacaccacgccaccatcagccagcaccatagcacctccttccagatagaactcgcccttggagtcacggatcaccgacgccgtcagacctgcagcactactgcctttacccgacgtgtagacacccacgggggcaatcttctccgtaaacttcaagaactgcgacttggccgtactggggtctcccagcagcagcacgttaatgtcaccacgcaagatcatgccatcgggtagcctcttcctcgatcctccggccagtaagcaggcaatagccttcttgatgttcacagtgtagtcaccgtagatcgacggcgcaatgctcgtcgcgagcttctcgtacagctccgggtgtctcgccatctcgtggaacttctcctcctccgccggggagaaggtcgccttggctcgtcccgctccttcttcatcaatctcaatgcccaccacgcgcagatacagcgtgcggatggccacagcgccgacgctcttgcctccagcattgaccacggacgtgatccccaccacagacacgcgtgtgcccggcgacgctcggtccaccaagtggcggtcggcgatcagcgccaagttgcgcggcatttcacccgtggggaccacctcggggttctcctgcagcttgagcgtctgctggtccacgtactcgcccttgtcgggcagcaccatgtacgagtccttgggacagaggtctccggccgccacgctggcgtcctcctcgcggttgcggtcgcacacgcgcgggatgctgacgccgcccatgcccgacacggccacgcgcttggtgtggccgcagttgcggcaccgcagcgtggccgacacgcacttggtgcgcacgcgcgtggcgctgatgacgatgcccggcaccttgacgaggcggttgatctcctgtgcgtgcacgtggcggagcggcacggccgcctggtcgctggtcaggatggcctggatgtccggcaggttgctggtggccgcgcgcgcgctgtcggccgcgagcgcgtcggcgccaacgccgccggcctcggcgctctggctggccaccagcagctgcgccagcatctccttggccgcgctctccagcagcgggagctgctccttggggttcttgagcagcaggtcctgcagctcctggtcgaaggccgccacgtgcgagaggttcaccgtcacgaaccagtggttgcgccgcgcgttggccaggagctgctcgcggtagaagaagagcgggcccacgcggaagccgcgcaggaaggccagcagacgccgctgcagcgccgcggggctcgcgctctggcgcgcgtccgacgcctgcgcgctctccatgcccacggccgacacgcgacccgcatcccagtccattgttgctacaggaagagttcaattatggccgcaatgcagcaaaaagcgcgggaacgactggatacttaatcgaggaaaaacggtagcatagttgtgtaacgtacgtagttataatcgaggattgtgattggagggagcaagttgaagtgtgttggccaaaagtagccatcccccattgaggccaaggctcttatcagatgcgaccacagagtcttaccgcaagagttaaccagccaagcaatgatactctgttctctcacttgttctctttttgtctcgacgttactgcaactgtaactgcgatgaaggctcggttcactgtgaacccgttcgaggagctcaacctgacggagcttgaccagaccagcctcaaggacctggccaaccaagtcatcatgaccaccagatgtgcatgaagtacatggacgccaagctccaggtggatctcacgcactggaaacctctcaaggacaaggacagcctcaaggtgtactcggagaggcccgaagctgtagctgctgcagtagctgcgggtgacgagccgaccggggcaggactgctcatgattctgtgcgttggcaccaagccggggaagctggacgacctcatgtacggcgtgaccaacgaagacctcgagacgatgcgactcaaggcctcctacgtgaacgacttcagtggtgcagccgtgctcgagttcgtcgtcttgccctcgcttgaagacccgttccagtcgctcgtcgtcaagtggatggagctcgatatccccttcagctcgactagcctggtcaagaaccgtgactatgtctacctggaaggcacaggcttcgttacgaatgcaaggggagagcgactgggctaccacgtgctgcactcggtgagcttcccgcagacccacagtctaccgaaccgcgtgcgtggcaacatttccctcatcggattttggcgccagacgggcaagaacacaatggagctgtatgccacaggcatcatggatccggtaaatgacggtctagtccgcaagctcgtggtgccgaacatggcgacgttgttcctctccagcctgaggtatgcccactgcggacggatgcgcaagctggcattcatgctggaacagcgctaccaggagtcgaagactcaggggactccgaacaaggagagcgtatgcgtgacatgttcctctcagatcactgggcgtcgtctcggggactttggcaaaagcaacagcacgtgcaaactgtgcttcggcttcgtgtgcagcaactgcaagattgtccaaaagctgagctttgtggacgcagacctgctactatcacagcgcaaggtgacgttctgctcgaagtgcatcagcgaggtgctgggcatgagcgctgttgatgttgcccgcgcttctctgttgggcaagaagaaacaccagcacaccagttctagtattgagacggctctgacctcaggtggtaacagttccgacttctcttacgccagcaattaagcattgagttgtatctagatagtatggaagtgtgaaaggcagattaacccgtagatattagtagaatgagaaggcaagtgtatatttgtggttgtttccacaaagctggagcatcttgtgctcgatgggatgtggattgagcttcacattgtataaaagttggaactgcggcagtagtccaacaaactctattgccatgtcaactcaatatgaatgcaagcaaccatttgcagcctacactagcataataacattgacgcacatcgtccttcgagtttattgtcgatgcaagtcgcattcgatgcaatgtagcctcaaaggtcgcgtacgctgcatggactgcaggcagataggcttagttgcgcaaccgcgccaatactcaataatcgctctatacaccccgccatcgtctgcctcaaacatgcgttgcttttcggtatcttgcgcgcgttgcggccaataccaacagtcagctcccacttgacatggaactgcacagcaaccaaactcactcaggtgggcaattgtgccgctctcacagggtattgaggctacttggctggtgatgcgcaactcctcgagtgagggtttccggtggccttcgcacagtgcaatagttggagccgcaagctacaaaactcccatgggtgcaagagctctttcacaacccataacaccgccattacaacaaatgcaaaacacgcaccaccacggcgctagcagacacctcaaccgccgaagatcgccccgcgatcctccaagtatcttctcccttgatcatctttctcgcagcagtctccaaacagagttccaatccattccacgcgagggcacgaagccccagagcccacgacaaccttgcagcaagtcttgcagtgccgcgcatcattgcgtgtgcaagcaaggctcattggccgcagcatcggccgaggccaaccccgccacgtcagagggcggcgttgattcgctagcgccagccaatgggcggcggttttacttaaatatgctgcttggattccttgctgcgacacgcaggcctctcactcgctttcactatgtcgaatctgagcaagcaaaaacaactcggtaaaaaacgggcgctcattggcccaaaaggctactaaaaatcggtaaaaacacgcacagccgccgtttctagtcccaaaaaggtcaagatcttttgccgtccagcagctcagtttgcaattcgccagcttccccccaagtcatcaactaccctaccagcaatggccgccaagtaccagatcgtgctcatccgccacggcgagagccagtggaacgtggacaacaagttcacgggctggcacgacgtgcagctgtccgagaagggcgagcacgagtcgcacgatgccggcaaggtgctcaaggccgcgggcttcaagttcgacctggcctacacgtcggtgctcaagcgcgccatcaagacgctgtggaacatcctcgaggagacggacctcatgtggatccccgtggtgcgctcctggcgcctcaacgagcgccactacggcgcgctcacgggcctcaacaagcaggagaccgtggacaagcacggcatcgagaaggtcatgatctggcgccgcagctacgccacgcctccccctgacctcgatgccagcagcgagtactacccgggcaacgaccccaagtacgccgacgtgcccaaggagctgctgcccttcgccgagtcgctggccaccacgggcgagcgcgtgctgccctactgggagcagaccatcatcccgtccatcaaggagggcaagaagatcgtgatcgccgcccacggcaactcgctgcgcgcgctggtcaagcacctggacaacatcccggaggactcgatcacgggcctcaacatccccacgggcgtgcccctcgtgtacgacctggacgagaacttcaagcccgtgccgcacaaggacgccatcgcccccctgtcgggctactacgtcggcgaccaggaggagatcaaggcccgcatcgccggcgtcgccaaccagaccaaggccaagtaagtcgtcgtctcgacccagtgactgttgcctcgggacggcggtgacggagcctcctccacacttgccgcaatatagagagcatcgctgtgtaatttcttaagaaaaaaaacttgacaaaatttgcgatggtgttttggctgtcaacgcgcagcagagaagcgcaggcgatggctggatggaggtcatcgcactcaagtgacgaggcgagtagagggcatcaatgccaggaagccatgacgtaagtatgtaaagcgtggaggcatggcccgaacacgtagcagcgaatctacaattgtgccccagcatgaagatactttggccaaccgctcatcgtgtcggagtcaacttcaagcagggtgtctgattctgtaagcgtattgctcgtgctcgtttgcaacgtatcggcagccatgactacccgcatatgggagtgtcctcctccaccccctcgagggaccatccactgccgtttgcaacagctttggagtgaatcggttgctcgacatcatcatcacaaaagctcggcttattgcctgttcttatccctatcaaacgtccaagaggctctttggagaagcgaacgcagatatattggcgcaggtctttaatgcacgctctgccgtagacgacttcaattaaggcacagtttataaagtctctatgctcgtcaaggtataataggagctctggttgaggacaggcaacagataaggttatcggtcacctgcatcttccgccccacatggggtttataacgtctgctgaaattgcgttgacaagtgagaggcccagcgatggacgctgatcatttcagctttcgtcttgtatcccccacccgagctcgagatggcgagaggagacgtacttgcgagtccgttcaagcccgtgacgctctcgtctatagacaccaagcagctgcgagctgtggcgaagacgatcctcgacgcgaacttgcaccgatatcgacgcttcatggacgttgacgaaggcagagttgacccgaacgagtggaagcttgtgcgcacgaaggaccaagtggaagtctacctcgaacgcccaaggaggaaagctttttctccctttcaagtccacccggtcgccgttcagtcagctctgcagccgatactgtgcgtcggaccaacccccgggacgctcgacgacgttatgcttggcgttgccacccgcgaagactccagcgacctcagccgcgctgcagtcctctcgactcttcagacgccgacaccagcggaccctttcaagtctgtcgctgtaaagtggacggagctggatgtgcaactgaaatccatggggctagtcaagaatcacgactgcgtgtacgtcgaagccacagacatccagcatctgcccagcggcgagcgcgtaggttaccaacttcagcactcggtggacatccaagaagcgcacaaactgcctggaagagttcgagctcatctatcggtgtgctcgttcttccgccaagtgacggacagtttagtgttcgtctacaccttagggatgatggaacctatgagcgacagaactcggcgagtagtgctgccgcatttcgtcaatacactgctttcgacgttcaagagggcagcatctcctaggccgagcagcctggcggagactttcggcagacgctactcagacttccggggtcaagaggacaactgcgtcacctgctcgcagcgggcgcggcggagaacttcaagtgcatgtaacgtgtgctccaaatgcgtctgcggttcgtgcaaggtcgtgacggagccgagcttcatgacgccagagctcgacatggttcaacgggaagtcgtgttttgttcggcttgcgcgaacgaggaggatgtgtccgatttttcgttcagaggctccgagtttgctatgccacggcagagcgagtgctcagtcaccgctggataatgttcgttgtattacttgttactaggagagggctgtagaatatatctgtagactcaaaagtgctcgactttgttaggtaaataaagattaaaaccgggattgcgttgacatgggtgttcaagcaccagtatacgtaaattcatgatggcaaaatcaatttgatgcctcgagttgtaataagtgttcaaaaaaggcttaaagatttttttagaatcttaaaaataatataatattattaatacatgtaagtagtaatttgattttaaataaatgactttattacccgtaatttatcctttatattcaaagtaagctgcttttgctaaccgttagcagctaacgtttggctgtgttttattagctcaataatgtattacccttccaccgattcatcactggcatcacacttcacgtacgttgctttgcaatgttatggcacggtcgctattaacttggaaacttggtggtaaaacatgtccatgaagcaaccaggttgtttgacaatcaagccatgaatcttgaaaaccactttaccgccagatcaacgatgggtcgacccgcatctgcttatcgcatctctcttcaagaacgcaagttgcttgttctgagatgcacgaacgaaaatccacgagtaccggtacatccgataaaagtaccaaagtaagcttacatggattaaaaacccgacaaaggggcatttatgaacaaaactcgcattacatcggactgacttgctgcatctgggtcgaaatcgggtgttggaacggtcacagacatcttcccgcgctccgtatgggccaaaactggggatttgtttgacttcgggagcacgaagcggtgaggtgaaccaagccaaatgccatttagcaattcgttccggttccgcacgagtcacataagccaggacagcgttcactatgagtccgttccgacccatttcgctctcgcgcgcagacacagagctactacaagccgtcgcgaagaccatcacaacagcaaacttcaaccggtaccagcgcttcatcgacgtagaccccgccacgtggaacctggtcaagtgcaatgaccaactgaagatttactcggagcggcgatggaagcggcgccactccacagcgcaaagtgccttgctggatgcggattcggcctctgacttgcagtcaatgttgtgtatcgggtcagctcctggtacagtcgacgacgtgatggctgggattgtcgacccgttgttcaagccttcacaaaccaagacgctgttcccgaatgatctcagtggggcggtcacactcgctacagttgagaacccgacaccgaaggagccattcaagtccatgtccgtcaagtggctcgagctggacgttcgtcgtcgctcaatgggcttcatcaagaaccgcgactacgtgtatgtcgagtccacgggcgtggagtacatcccgagaatggggcaggttggattccacctcatgcattcagtggacattccggaagccaacgcattgccaggacgaatccgtggtaagctttcagtatgtttcttcttccgtcaagaagaaatggaagaagaggactcggtctcgatctatgtaatgtggatgatggactcgatgaacgaccaggctcgacgggtgatcatcccccacttcgcacagatgctgctctcctccttcaaaagcgcgcaggaaagtagactcaagaagctggcgcagactcttaacaaagggtactcgggactgaacaacttcaagctgcacgtggcgacgccgtatttcacctgcgtcacgtgctccaagcgcgtatggggcgtcggaaagctcacaagtggcgacaacgacaacacgtgcgagctctgcctcgggtacgtctgcagcgcgtgcaagatcgacaagaagcccaagttcttcatctccagcttggacgagagcaagaaggatctcacgttctgcttctcgtgtctgagcggcgcgatgacgtccgaagcctccaagctgtcgatctccgagagctctagcaactccaacggactgattcgtcgagtctgtcgctcggttcgatcgctcaagtctcccggctggaacatgaggaacacggcgacttcgactagtttctcgagcgcgtcgtgaccagaaatttccaccaatagagtagtttatgtgtaggctgagtgaaggtagagttgtgaccataacaagaattgttttgcggcttgttcatcaacgaaaaagatacgtaaagagagcgaaggagacacagtgtgtgaaaattgccacatcgaacaacaaaaacaacaatacagtagccatgtggaagtcgagcactccatgatgttgacgttgccaatttggcagtgccgctgccactggcagtgccaggggggggtatctcaagacatgatctatccggttctatggagatgaacgtcgaacgccgttgaacgccctctcgatcgaccatgaaaggcagcagttcgacggtgccgaggcataaaaattgtcgaattgtggacaatgcagcttacacatccttcagaacgggcacagatgtactcggagcacagggatacatggactccaatatgctgcttgctcatttgtgtgcactccaatccggaccgaacctggcagcatgtggattggagagacaccgggttgcggtcgcgagccacagcacaaacacttactgctatccgcatgggcaagtaccatggagatctgtccgaccccgtacagtagcggcccgtatcatgctcgtcacttgccaaagtgcttgagccttcacacccgagcctgtgtacgatcatgaccaagggcggcttcttcgagaccacgttccagcccgtatcgctgtcgctcgcggactcgaaggagcttcaagacgtcgtgaagaccatcgtcgatgccagcttcggcaggtatgtgaacttctccggcgtggacccgaatctgtggaagcctctgaagaccaaagacgggattcaagtctacagcagtcggtcggagcagcacagaaggccacaacctccttacagcgagcctgtggacgatgactccgagttacagtcgttgctctgcatcggctggacttccacctctttggacgacctgatgcagggcgtcgtggactcgacgactgcggtctcaaccagccggacgtcgttcgggaacgacttcagcgatacggccatgctcgctctagtcaaggacccgtcggtattggaaccgtacacgtcggtcgccgtcaagtggatggagctggacgtccgtcgtcggtccatggggctggtcaagaaccgcgactacgtgtacgtcgagatgacgggcgccaagaagctgccgaatggagaacaagtcggctaccacgttatgcactcggtggggatcccacaagctcacgctctaccgggcaaagtccgagccaagctttctgtatgcacgttcttccgtcaagtggacaaggcctcagtgtccatctactccatggggatgatggatccgatgagtgaccgcgtgcggcaggtggtggtccctcgcttcgtcaagatgctgctgtcgacgttcaagtgcagagaggagagtacagtaaagaagttgacgcagtcgcttggtaaacggtactctgagctggacaaccgtcgaccgtcaagctccgacaacagcaactgcatcacctgcaccaagcgcagctggcgattggccaagctctcgagtcgcaacaacacttgcatgatctgctgcgggtacatctgcggctcgtgcaggatcgaaaagaagttgaaggtcccgacgccggatatgaagatagtcacgaagaaagtggccttctgcttctcctgcctgacagatgtgatgacggcgaatgagtccgagttctcgtttgttgaggattcgaacgatgcccccgagatccctcggtcaacgtaccattcggtttggtccacgaggttgccacgctggaaccacgacgaaccgcacgctgattttgctagtaccaggtagaatatgtctgcagatacattaaaataaaatgttttacaaattttctctgttctgaaaactttctattcatccgattttcagatgatcagaaaggaagctagtatgtaggataacccagcaggtagaagaaggaactaccgcgacaaaaagttagcttggacgggaagatgaaaaaccatttcatcataggatggaagtgccggaaacttcctcatcgctccagtgttgcccttatcggtttgtatcctcctctccatcgtcaaaatgccgtgctattagtaagcctatgttcctagtaacctttcgtcgcccatgctgtcaaagtagcacggctgtatgtatactgtaccatattgtaaactgcttgggtttggaccagtcgcgatttcacccaaggggctgacaaactattcttttataatagactgggaaattgatgtgaacgaatattacatgtacaatgcggattccatgttcacattgtgcaaacctcgctcacctgcagcgatacgccgaaggagctagggaaaacaagaccttcacaaggcacccagttcctccatgttgtcccgaaacctccgcgacaatttcccctgttttggtgaaacccataacccaaacatgccatcttcccgctcttgggcactaaaaacagcagaaaatgtgtttcatcatagagcgcaacaactttcagcgcgcgaacagtactgacttggatctatcacctggtaggctcctgcgagttgatttgtttgcaggcggcttccaagccacaacttaaccaaccggttcctgtcaccttgagcacagtacatgttctgaagcacatggctcaacgttcggactctcagaccagcgggtccttggttcacttcgccattagccggacgagtgtcacttccgtatttgcccacgacaaccaagatgaccaacgactcgagtccttatcagtccaccatatcgctcacgccgtcggactcgacgcagcttcaggtggtggccaaggcaatcctcgacgccaacttggaccggtatcagctcttctccgacgtggaaaatggcacagtggacccgagcatgtggaaactcgtgaagaccaaaaacgacatgagcgcgtacatgcagcggcaacgacgacacgtctccttcccattccaagtcaacccgagtgacgacaactgcgcacttcagtcgttgctctgtgtcggctcaagccccggcacgctggacagtgtgatgcgcggagtaggaaccccccgcgaaggcgacatcagccgcgctgttctactcacgacgatctccaagccaacaacgagcgacccgttcaaagccatgacggtgaagtggatggacttggacgtgcggttccagtccatggggctcgtcaagaaccacgactacgtctacgtcgaagccactggcgtgttgcaccttccaagcggcggtcgactgggataccagctcttgcactcggtcgacgttccaggagctcatgagctacccggacttgtccgtagtaaactatctgtgtgctcattctaccgacagatcaaggagaacgcggtgtccgtttactcgctgggaatgatggactctatgagcgaccgagccagacgcgcagtggcgccgcgcttcatcaagctcatgctgcctacgccgccgacgcaatgccgcggtgacgcgatgcggttgtcactcgcgtccgccaagcgctacatctccatgaccctggcaccgcagagcattggcgacaactgcgttatctgctcgaagcgcgtcctgaagctggggaagctgctgaaccgcaacagctcgtgcagcgtgtgctccgggtgcgtctgcagctcatgcaatatcaagaagaacgtgcgacttgtgagctccgacatgaaggtcacgcgacggagactcgtcttctgctcgccgtcgccgtgtctcgagaacgccatggcgcagaacgaagccgaggtgtcgctcatggacaacaatggcggagtcgcgaggttctacacggccgactaccgctcggtgacgcagtcgcagtcgaggtcgaggatgactagtgtgtcgtcgtccattgtttgctaggctaggtatctagaacgagatagtgtatggttaaactctattgaatgtcaatgcgatcgttttacgactacatactacccgtgttctggtagcgcgtctgcatccgcgtctcgtactgagtgggctgcaacgagtgctgcgctgatctccgatgctgtgcgtacacagcgcacacagaacgtcatcttctccgaggtcacgcctggcttgtagggcgacaccttgagcatcttgtggacaactcggcagctcgagcacacgcgcgcgcagcagacgcaacagatcttgtggatgtctccaggcgccgcgggtttcacggtgcgtttgcatagtgaacactccttacagcttccacttgactttaatggaggggtggcgcgtttgagcagatacgccagcttgtacatcttggcgcactcgaggttcttggggatggacatgacgatctcagtgactgtcgagaccacgagagactccggtgcgtcccccatggcacacacgaatccccgaagaaatacgtcgacgacgcgctcggagcgctgtcgatagaggtaacagtacgacagtctagctcgcacaataccgaactccgtcagctcgtggacgtctgggaggtcaatagaatgcttcaggtgataccccagaggctgtttagctccgtccggccccgtgatagtcgtaaagcccgtcgtctcgaggtatacgatgtctctcaccctcataacagtcccaaccaggaacggatgagcctcaactgcccatttgacagcaacctcgtggaacggctgagacggtgagggctacacgagttaaccgagcatcgcccaatccacatagccatcctccaccatggcagacttgagctgcatcctctggcttgtaggcgtttgcagtccgagcatacagtcctcgacagtgccatccaaactaccgactgccagcatgagagacaccgcttcattgccacactggttccccaacaaccgcaaagcattcacccgatctgctgtcgccgccgccccgtacagcttgtagtgagcttcttccactcgctcagatcaactcgttcatggtgcgtcgtcaagaagtcgtagtagtaatcgcgaatttcacgcaccacgctagttgcgttgttctcgagtgtttggacttgctcaagtggtagctccaccacggggaagatgttgcgaggcaacgggaactgcatgaggaacttccgctgcttggttggtggtggcgaaatgttaaatggccgcatcggccgtctccgcagctcactcaatggcgaagttggtgcgtgtgcaggctgtggagctgcatcgcttcacgcaagcgctgtatccccaggggcgaagtgtggtgcaaatccccgcgcacgatcgtgcctaacctcgttgctggagttgacgacgtgttatcgactcgttatcatggtctgctttgtcgctaaccttggtgccctgagtgccaggcgtcttgaaggaatggcacggcacgacgacgctgcagcgaccacgaccagctccatcgcgggatgaccatcgattggcgagatcgtcccgatccggagttggtggtaggtcaggcgtatccacgatctccactactgcgcaacgtcgtcggactagacaatgctgctttgtcaccacgcacgtgtcctagcagcagcattgcaagtggtgcttggttgggctgtagcacaaccgaaagtttgataaggtttgttaagtttaccacgtggccacttcaccttggaggccgtcacatcaacctcttaatacctctcccgatatagcgctcgagaacttctggcttcggcgtgatggaagaatgtgggcagtgccgaagtttccagagaagagaatagaatagaagagaagagaagcacgcgtccacgccacctcgcgaggcgctcgtccagccgactccaacgccaagctccacctctcaagaccatgactcagatgaagacgaacgacgaacttctgcaccaatacactgagaatggcagtctcgggatggaggagcagcgccaaccttctcttccagctgatagtggcagtgataccgtccaagtcgcagacgttgtcgtgctctcaacggaagagctgacccctgttccggaagcttcaagcgcgtcggtggatgacagcgtgcacattctgaccaagacgacaacggactggctgcagctgtacgaagctgtcgtgatgctgcgccggatcgtagtgcaccacagcgaggcgatcaccaccaagcacgtcgaggagttcctgcgaccgcttgcgctggagtgcgacagtctccgctcgactccgtcgaagaacggcctgctggcatgtgcggaatgcttccggttcctacctcgatcggttctggagcgtccgttgctcggcggtgcacacccggaggtgttggacgtcctcctccgtcgctcggtttgtgagaagaaattcctgcgtgacgcggcggcgactgcagctgaggaactcgcagctcacttggctggactgccgcttctcgctgctgctgcgcggtatggtaccaacaagaatggcaagctgtgcgggacggccgcgaagatcatagcgttgagtctgctgcaattgcaacaagaccagcagacgctggctcacaaaggcagcgagtctttgcgatcggtgtatcgagcgttggcagccttccgagagagcaaggacggcacggcacgcgctgaagctacagcgagtttccagcgactgggcgagctgctgggtgcgcaggagctcgagttgggcttgaaggacgcgttaccaggcgctggccaggccggagtcgtggctcgcatcctgaaagacgcgtttcctcggaccaacgtcgccaaggcgcgtgaggtaggacgccaacggacgagcagggacggtagtaagacggtaataaatcgaggacttcaagaaatcagtgacgtgttgccttgacaacggaggatggcactgagttggccgtcatggtgcatgagcaggcgatgcagcagtcaaattcagttaaaagaagcgaatcttcctgcccacttcttttgtccgggtttctctaactaaagcagagcagaatcacctgtgcttgtcaacgttggcgccgccgcagtgaagcgcaacactcgcggactgcttcaagttccccatcgcttgtgtttcgcgctcgccctcgcattttgtgcggcttgaacagcaattgcaattgcaccaagttcaaccgccggatcgcgggggatgggcgcgaccagtgattgggcagcgataccgccgctacagtcagggagggaggtcgtccctacactattctgtcttcactatgctggaccttgccgactgatcacgaccttcctcctgacctccacaccacttcatatcaacatcatcactaaatatcacaggaattacactatagccaggttgttttgtatgcgtctatcgatccatattcagccatagacgtggcaaaatcaactatacccagctgggagggattcccagcatcagcctctccagggcgagtccaagcaccaaagacaagctgcaccccacgtttccgttggctcgcaccgccacaagccaaggacgctcctcgtcgacaggtaagcagccccaagcaaccctggcaggggcaaatcgctcccgacacttaatagacacgcactgcaatgtctgcttggaggagggaaaggatttgacccgataatggaatgataccgtgctgaccctgtgtgtatcaatcgcctcattcgcagaccttcctcgtcgtccgcacctcctcctcaaccttaatcctccagtcatgctgcgcaacctggccctccgctccgtccgaacgacgatgcgcaacgcgcgcagcatcgcgtcggcctcggagctgtggaagaacccgcgcagctccaagttctccatgaccaagatcgtgggcaccatcggccccgtgtcggagcagctcgacatgctgcagaagctcacgaacgagggcctgcgcatcatgcgcatcaacttctcgcacgccgagtacgacgaggcgctgctgcgcgtcaacaacctgcgcgcgtgccgcggcgtgcacgccgagggcaaggccaagttcaacctgcgcgccgtgctgcacgacaccaagggccccgagatccgcacgggcaagatggccgacggcaagaagatcaagctggagaagggcaagtcggtggtgctgaccacggacccggccttcgagctcacgggcacggccgacaagttctacgtgacgtaccagcagctggccgagacggtcaaggtgggcgacacggtgctgctgtcggacggcctcatccgcctcacgtgcacggccgtgggccagggcgagatcacgtgccagatcgagaacacggaggagatcggcaaccgcaagggcgtgaacctcccgggcctcatcgtggagctgccggcgctgtctgagaaggacaagcgcgacctggactggggcgtggcgcacgacatcgactttattgccgcgtccttcatccgcaaggccagcgacgtgcacgagatccgcgcgttcgttgacgagtgcatcaagaagcactgggcgcacgagcccaagtacatcgcgcccaagatcatctccaaggtggagaacctggagggcgtgcagaacttcgaggagatcctcgaggcctcggacggcatcatgtgcgcgcgcggcgacctgggcgtggaggtgcccgcccagaaggtgctgacgtaccagaagatgatggtggaccgctgcaacgccgtcggcaagcccgtgatcgtggccacgcagatgctcgagtccatgcagaacaacccgcgcccgacgcgcgccgaggtctcggacgtgggcaacgccgtgctggacggcgccgactgcgtcatgctcagcggcgagtcggcgcagggcaagtacccgatcgagtcggtggccaccatgaacacggtcatcaaggaggctgacgagctgctgctgcagcccacgtaccgcgccaagttccagttcgacccgcccacgtcggacgtcgagtcggctgtgtcctcggccgtcaagacggccaacgagatgcacgcgcagctcatgatcgtgctgaccgccacgggctacacggcgcgcaaggtggccaagtacaagcccaccgtccccgtcatgtgcttcaccgacaacctcaaggtcggccgccagctccagatccaccgcggcctctacccggtcgtgcccgactacctcgagcgccgccccaccacggccgaggccatcgcacacgccaagaagatgggctggctgtcctcgggcgaccgcgtcgtcgtcatcagcggcgacaagctctcggacgacctcggacgcgagatcgtcatgggcgtcgccgacgtgcagtaagcagttcgtactgaggggataacaacccacgtataactcgacaatacacagcgttagaatgttttgtattagccccgctagcggcttactaccgttcctgctcgtccgttggcgtcctgcctcacgcgatctcgcagcgagtccgtacgaggacgcgccttggcgacgttggtccgaggaaacgcgtctttcaggatgcgagccacgactccggcctggccagcgcctggtaacgcgtccttcaagcccaactcgagctcctgcgcacccagcagctcgcccagtcgctggaaactcgctgtagcttcagcgcgtgccgtgccgtccttgctctctcggaaggctgccaacgctcgatacaccgatcgcaaagactcgctgcctttgtgagccagcgtctgctggtcttgttgcaattgcagcagactcaacgctatgatcttcgcggccgtcccgcacagcttgccattcttgttggtaccataccgcgcagcagcagcgagaagcggcagtccagccaagtgagctgcgagttcctcagctgcagtcgccgccgcgtcacgcaggaatttcttctcacaaaccgagcgacggaggaggacgtccaacacctccgggtgtgcaccgccgagcaacggacgctccagaaccgatcgaggtaggaaccggaagcattccgcacatgccagcaggccgttcttcgacggagtcgagcggagactgtcgcactccagcgcaagcggtcgcaggaactcctcgacgtgcttggtggtgatcgcctcgctgtggtgcactacgatccgacgcagcatcacgacagcttcgtacagctgcagccagtccgttgccttcatcagaatttggatgatatcgtccaccaaggtactcgaaacttcaggaacaggggtcagctcttccgttgagagcacaacaacgtctgcgacttgagcagcttcattatctccgtccgcaggaagagaaggttggcgttgctcctccatcccgagaccttcatcttcagcgtattggtgctgaagttcatcgcccgtcttcatttgagtcatggccttcttcggagatggaccttggtgttggctggacgaacgccttgtggggagacttggactcgtgcttctcttgtctggaaactacggcactgcccacattcttccgtcacgtcggagtccgagccagaagttcccgagcgctatatcgagagagggaaggacgcggcttcatgcggcttcatgtgacgctctcccaaatacagaccaaaaaaggtagccaatcttatctgcgcataaatttagtctggacaaagaataagtggtgtgtttttccggactaaatttaaaatatgcgacctatatttggtaggcccgatcaaatctgaaataggtttggagaccataaaacttccagattaaaatatggcatccagaaataggtcacaaaaatagtctgaaacaactgtcttaaaatttgtgtcagcttcaaactgccacgacctacctccgtccttgggcgccttccaaaaccctcaccaaaggtcgcgcataaaagtttaatcccggagaattgtttgatgagaccactttttggtctcatcaaacaattctaatgcgactcttaactagcaacgtgattaaacaagtgactgaactccactatattcgaaggtcgcgttccagcaaccgttttggggcgcattaaacgcttcggtaatttaaaataaattacggattaaactgatcaaacggttttatatggctctgaccgcgccaatcgatacatcgatggtatttttccgagttgcaacgtcacgagtcgccaaaacgcttggcactcgggtcagcgaggctaacgacaatgggtgccctgtacgaggtcagacacgacctgcgcggtcttttgccccacttcatcgcttgcgtgatacagcaacttacccttcgtctccagctccagtgcaagctgcagaacccatgacgatccttgcgccagcagatataatacatctacagtacgtagagacggcatcgagcaggcaagagagactgactgtcggcgttgatgggcgaagtttcagctctgcccaattcacatgcgtacagtactcgcgagtggcttggctggagataagacaccagggcgcaaagagcacgcaagcttttgcattgacgacggccccgtccgtgcctcggataccttgagcacttcagtaggtcagtacacagtgagtttcacacaagtcacctctcaaccagcccgccaccagtctcacgcgaggagcaagacaaccccttcatgaagttcccactgcctcgcaacctcttccccgcggtggaattgccgcccgatgaagctcaagcgctcgagagctacgcggccagcgtggtgcgcgagacgcgcgactactatcacgacttcttgacgacacgccagggacaggtcgacccgagcgagtggaagaagctcaagcagcaagacagctttacgctctacaagcagtacggggcagcggcggtggagcggaggagcgtgtcaaggctacgagaccctctgcgcgacaacgaagtggtgcccctcatgcttgcagtcggcagcttggatggaacagttgaggactgtatgctcggactgcggacgcctacaagccagagcatgcagctcaagtctgctatggtggaggatggctatgtggattgggcgatgctcggccaactcgtgtagccctcaccgtctcagccgttccacgaggttgctgtcaaatgggcagttaaggctcatccgttcctggttgggacagtcatgcgggtgagggacatcgtgtacctcgagacgacgggctttacgactatcacggggccggacggagctaaacagccgctggggtatcacctgaagcattctattgacctcccagacgtccacgagctgacggagttcggtattgtgcgagctagactgtcgtactgttacctctatcgacagcgctccgagcgcgtcgtcgacgtatttcttcggggattcgtgtgtgccatgggggacgcaccggagtctctcgtggtctcgacagtcactgagatcgtcatgtccatccccaagaacctcgagtgcgccaagatgtacaagctggcgtatctgctcaaacgcgccacccctccattaaagtcaagtggaagctgtaaggagtgttcactatgcaaacgcaccgtgaaacccgcggcgcctggagacatccacaagatctgttgcgtctgctgcgcgcgcgtgtgctcgagctgccgagttgtccacaagatgctcaaggtgtcgccctacaagccaggcgtgacctcggagaagatgacgttctgtgtgcgctgtgtacgcacagcatcggagatcagtgcgtcgcttgtagccgtccactcagtacgagatgcggacgcagaagcactacccgaacacgatgtcctgctctggagtatcgacgtcgccagctcgatcaactcgtactcatcgtccgcgaaaagtgagagcgaagtgctttcggataagtttgtgtgtctttggcacatcggcgcaatgttctagctcaagcaaaaaagaagataggggaagtagctgttcgaaacgctgtcgctatggggaagaagaaaacgaacttgctggcgaccgacattttcatggcgaagtttgatcaggctcataaaattgttgtccatggactagaaagaagtacgtgcacggggacatttcgaagaatccatggccgtccttgcctgcatgagctcatgcgtatcatcgactctgaaggtctgctaaagctggagccactgcactttgatcgccactggtggctgccatcggctctcaagagtgcgcctccacgcatcatagagcctgcctccccccgcagtggacgacaacaaacccaacatgacccccaccgagtcggatacggcattcacagtacacgccgcaagccttccagattcgaaatcattgagcaagaccaagcagccgcaacaagaaccccagcgcaactatcgtcctttcaagcccttctcgactgcgatgataccgagttccagcaggtattctgtccgccccgtacgtggggttatgccagactgcgagcactagacgaatgaccgctttgacttcaaggtgcactttgatctgtattctaaaatacatacacgtatcgttatctcgatcttgcgttgactgtgaagtcaaatcattcatgtggtgttactgccatcgtatgctctgctccggtgctccgctttcgatgctccctagcttttcccgataaacttcagtacaaattgcattggcgtcaagcataagagttggctatcgaccatcatcaagaactgagtgcaggagtgggaagcgggtgcctctccctttcaacagcgaacagcgaccgtaaactacgaccgtatcgacctcatttgacaactcgctcgacagccagcgagtactaaggtcaacagtggcaagatgaagggccgatttgtcgttaacccgttccagcagctcaacctgattgcagccgaccgctcgagccttgtggagttggccaaccaatgcatctcaaccaacctggagtacttaacgcactaccagaccaacaagcgcagggtcaacccagctcactggaagtcgctcaaggagaaggagaagctcaaggtgtacacggagaaacccgagggcgcagcagcagccgcagcttccggcaatgagccgaccgggtctggcctgcccatgatcctctgcgtcggtacgaaggaaggcaaactggacgacctcatgtacggcgttgtcagcgaagacctcgagacgatgcgcatgaaggcctcgtacgtcgacgactttagtggagcggctgtactcgagtcggtggtgctgccgtcgctcgaggacccgtgccagtcgctggtgatcaagtggatggagctcgacatccccttcgcctccacgagtctcgtcaagaaccgcgactacgtttacctcgaaggcacaggcttcgtcacgacctctaagggtgagcgcatgggctaccacttgctgcactcggtcaacttcccagagactcacggtctacccaaccgcgtccgtggcaacctctcgatcatcgccttttggcgccaagttggtgcgaatacaatggaaatgtacgcgactggagtcatggacccggtggacgctggactggtgcgtaagctggtggtgtccaacatggccaacctgttcctctcgagcttgaaatacgcctactgcggacaaatgcgcaagctctcgtacatgctcgagcgacgctacgaggagtcgaagctgcatgggactcccaacaggaagaacgtgtgcgtaacctgctcgtctccggttacgacccgaaagctcggagactttggcaagagcaacagctcgtgcaaactgtgcttcggcttcgtgtgccacgcgtgcaagatcgtccgtaagctgagcttcgtggacccggacttgctgctctctcagcgcaaggtgacgttctgcaccgcgtgcatcagcgaggtgacaagcatgagtgcgcttgacgttgctcgcacgtacttgctggcaagacagcgtcaccaggatgcgaactcaagtgcagacagggccctgtcttcaggagcaaacagtaccgagttgtcgtactcgactggcagtcaatcggaccttggtggtcgctagagtgtatagactgcttaacaagacaagaaataaaattgagctgagtgttagatccgagtgatcttcgaatatacttacgggcaaacaaccgcagtacactactgtactctccacaatcatcagccaacttcactccctatactcgcacgagcgtccatcttctcggctggctttcgcctcgaacgcgttgcggccaaccgtaggaagcttgaacgcttcacgttgaagcggaaaaggatcactcgtcaggattggagatcgacagcaggtgtctggacatcgcctgccccagctcaaggacgccatgatgcgcgcgtagaatattgccgggtgcattaggtgatgccttgactcaaggcatcactcttggcaaatgcgtaacccccatatgctgttgcatatgggggttacgcatttgccaagagtattgatatgaggccggcagaggcaggtggcccagctgacgctttgacgctcttcttgagctgcagccgagatcagagcggcaccacctcctacacttaccagcggtcgacgtcgggtcgtcgccccggctaacgcccggacgtccaaaagtcgtcgagggacacccagtcgacatccaaaagcatgtcactattgcgaaataggatccttaagacaccgcgaggtggcgcaccctgcattagcctcattgagggacgtgagtacatacacataatgtagactggtagtaaagcgcgttctcagtgaaactgagaggggcaacttctccgctatagatcgcgatagggtcgggtacaaacactgccgacgttataatgcttgcgatgacctacatgtgagcccgtgttccactcaatcaatctcgtaattggatctagagatgtatgcagttgcgcaactcccagacgacaaaggaaccattgaaggcgcgtcatggtctggtgtattcggcccagccggagacgacgcctttgacaacatggctggcgctgacactcaagtcgctgtctgagcgcagtcaacacttgctagggcgtctcatgcaagctactcagcttagatcagcgtccaccccatattttgtagttcatccggggcatggacatcccatcgttcaggcagactcgctgctagctggtctacagtgtagaccaaaggtgtagactctacagcattcgatagcggagctcttccaagtgaaaatcattatcgtacttggctgtttgtttgagtcgcggatacaagttgattgaggcaatgggcacgtctgaggtcaggagatttcattggcttcaccaaaactccttttgaccaatcagcagaaagtcgagcggaggatgtcggctcgactcgagcggacccacggacgtcgacagaaaaagacgtcgggtcaaggtcaaaaccctcgacgtcgacagctctagctgttacccatagcgtttcgtcgcgctacggtgtcttacctgatactgtacacgaccctcgagcaatgagtacagctccagatgccaaacctccagctgtgctgcataacttgcgcttgattccggccccagttgctgtcgtgctcgagtgagtactgtttggatcgtgtgagcctccacctcgcctcctatgcctcttggcagcaccacacatccctcacgtccgctcttcattcccgcacttgctccatcgccagcacccccacatacagtacattccaacggaacccaacaatgaagggccgattcatcgtcaaccccttccaagagctcaacttgaccgccgccgatcgaacctccctcgaagacctggctaaccaatgcatcaccaccaacctccagctctgcatgaagtacatgtcgggctcaaagcgttcggtcgacccgcaccactggaagccgttgaaggagaaggagaagcttaaggtctacaccgaacgccccgagggagccgcgtccgcgattgcgtccggtaacggtcccacaggctccggactacctatgatcctgtgcgtcggcaccatggaaggcaagctggaagaccttatgttcggagtcatcagcgaagaccttgagacgatgcgcgtcaaggcctcgtacgtcgaggatttcagtggcgcggctgtgctggattccgtcgtgatgccaacgctcgaggacccgttccagtcgctcgtgatcaagtggatggagctcgatatccccttccactcgactagtctggtcaagaaccgcgattacgtctacctcgagggaacgggctacatcaccactccgcagggcgagcgcatgggctatcacttgctacactccgtcaacttcccacagactcacgcgctgccgaaccgtgttcgcggtaacctctccatcgtcggcttttggcgacagatcggcccgaataacatggagatgtacgcgactggagttatggacccggttgactctggcttggtgcgtaggctggtgatcccgaacatggcgaatgtgttcctgtccacgttgaagtacgcgtactgcggtcagatgcgtaagttgtcgttcatgctggacaaggcttacaccgactcgaagctgcacggcgctccgaacaagaagagcgtctgtgtcacctgttcggcaccgatctcggggcggaagcttggggacttcggcaagagcaacagcacgtgcaagttgtgcttcgggtttgtgtgtcacgcgtgtaagatcagccggaagctgagcttcgttgacccggacatgctgctgtcgcagcggaaggtgacgttctgcacggcgtgcatcagctccgtcactagtgtcagctctgtggactgcgcgaaggcgttgctgctcaagaaccacagggccacccactatagtttcgagcaaacgctttcgtccgaaggcagcggcgagtattcctacgcgagcacgcagtaggcgttagattacagagttgtgctcgccgtggacacgaggttttaggcactgaatgaatgaatatgctttatcttatcggagtatttgaaccattcatcaaacgataccatcacggaatcaatgttttactcgataaccatcatgccattgacgtatcaagcggtaatggagagctgaaatgcgtcacgaaatcattttcgtcgccatatagagccagatggactgcgtgtcttcctacgagggatcatttgggggatcggataggtgaatcgcaacctcacttggcaatctttgggccaaccgcctcgtcagccatgcggcaattcttcacccctctcctccttctcgtcactttcgctgctacagcttcggccgacgtgaatggaagttcgacttcgcctagcttgaaaattgactccgcaggcggcgagactgctcgggatgctatcgaagctaaaaaatcctgtagcaggattcaaatttcggaagactgaggaggaaaaacaaattgcaatgtggctgaaggagaagaaaacaccgctcgaggtcttcaattccctggggttggatacaggaacgaagaatcttctaacgaacccgaagctcaagacttggagtttcttcgtgctggattacaactggaagagtcctggccaggcagcgagcatgacagcggtaatgacaaagacctacggagacgaagctgtggcaaggaaggccagcggaagaagaactcgggggtgaggacagtcgccagggcgcttcaggcggagcaatttgaggggtggtttctcaagggactgccccccgacgtcgtgttcaacgtgttgaagcttgacaaagtgggagctgataaactcctttccgccccaactttcaaggtttggtacaactatttccattcgctgaaccggtacaacacaaacaaggagacagatatgatcaagcacttgcagggtgtttacaacgacgtcccattggcgaaggcgatcgtggtggcgaagaaggacaaggccacgcaggccattgcaaccaagctacggcaaacgcagtttcagaactggctggttgaagggaaaaccccccacgcgatcttccaaatgctgatgaaggataggatgcattggacgcacgaggatgtatactgggggtacaaggcgttctacacgaacatatcgcgcaaggtgaacggcatttacactgtaatacacgccgacagatcttttgatatcggtaactcagaatgcagccatggtaccgtcgatactctcgtcggacgaggcagcgggttgccctcaagtcatcgcggtgttgcagtttgatcacgattaggctcgtcactacgaatacatgtatacatggccttccatcgtacacttgagttcaacaatgatttatggctgcagcagatcgagatacgaaacatgccccgttaccgcacaaaccaaggacatgttcggaacttgtgggtacgaagtacagtacaacgaggcagctcactatattgaatctccttctgccacctgcctcgaatcgcgggacccacagacttggatgcttgtccacgttgacaacggaatgatcgctcgtcaggattggcgcttcaacagcagcaacgttcgtcccaccctcaacatggtgtgcatgtgcctttgagcagcctagggggtcgaggttcgaggcgggttttgcagcttaagcatatgggaagtattgagtcacccctctgaggctggcgaggtcgctattaataaagggagagccccccccccctcttcctcttgaggaaggctatcccattgcgatctgccgcctgcgtttcacctcgctacgacgtcggaccgcggcgagcaacgcagatgtcaaattgtcatgaataagcagctgggctgcatagttacgctggcctcgcttgggttgatcccatgctcgcgttgcactctttcgtccaagtgacccttgcctacagctctctcattccaatacttgcctagtctccagcaacgcaacacacccagcagcccccattgtcaacatgaagggccggttcctcgtcaacccctttgaagaactcaacctcactcgagccgatcgcacttccctccaagagctcgccaaccagcgcatcctaaccaacctccaacactgcatgaagtacatgtccggctcaacgcgttcagtcgacccgagtcgctggaagccgttgaaggagagggagcgactccgagtgttcactgagcgttcgcatgctcctgttacgggcgatgaaccgacggggtcggggctaccgacgatcctctgtgtcggtactatggaggggaaactcgacgacctcctgttcggtgtcatcagcgaagacctcgagacgatgcgcgtcaaggcctcgtacgtcgaggatttcagtggcgcggctgtactcgacacaatcatcacgccgactctggaagacccgttccagtcgctcgtgatcaagtggatggagctcgatatccccttccactcgactagtctggtcaagaaccgcgattacgtctacctcgagggaacgggctacatcaccactccacagggcgagcgcatgggctatcacttgctacactccgtcaacttcccacagactcacgcgctgccgaaccgtgtgcgcggtaacctctccatcgtcggcttttggcgacagatcggcccgaataacatggagatgtacgtgactggagttatggacccggttgactctggcttggtgcgtaggctggtgatcccgaacatggcgaatgtgttcctgtccacgttgaagtacgcgtactgcggtcagatgcgtaagttgtcgttcatgctggacaaggcttacaccgactcgaagctgcacggcgctccgaacaagaagagcgtctgtgtcacctgttcggcaccgatctcggggcggaagcttggggacttcggcaagagcaacagcacgtgcaagctgtgcttcgggtttgtgtgtcacgcgtgtaagatcagccggaagctgagcttcgttgacccggacatgctgctgtcgcagcggaaggtgacgttctgcacggcgtgcattacttctgttacgagttccagctccgtggactgcgccaaggcgctgatgatgaagaacttcaaggtcaaccactcgagcttcgagtcgtcgtcggacggaagcgtcgagtactccaactccagtatgaagtaactgaaggcttgtttggttgataagtttgttgtgcgtttcaatatagacttttttatctccgaggacgatgcattcttcttatcttcttagtactgcattcagtactgtacccgatatcacgtcttcgaatcaatgatagtcccttgaagcttgaaactgtcgaggatgtcttagggcttttggcagttgaaggcacagtcttatctcccgctttgaacactcacctgcctgcttggtcttatcaagggttacccgattgcgcttctagcttaccaagtcacagtcagttttcaatccacttcgttcttcacattactcagaatcagccatggtgaaggggcgattcatcgtcaacccgttcactgagctcgcgctgaccgagcacgaccacgagcagctcaaggagctcgcgaataacctcatcctggccaacctcgagaagtacacgacgtaccaggacgagaagaagaagggcgtggatccgcgtcgctggaagctctgcaagcagcgtcaaggcatcaagatgtacgtcgagcgtcaaggaactgcgtcggcgggcgagaacatcacgggtaatggcttgccgctgatttggggtatcggcaacaaagagggcaaactggacgacctgatgttcggtctcgtcagccccacactcgaagccatgcgcgtcaaggcctcgtacgttgacgacttcagtggagctgctgtgctcgacagcatcgtcgagccctcgctggacgagccgttccaggcgttaatcgtcaaatggatggaggtggacatccccttcgcctccacgaacctcgtcaagaaccgcgactacgtgtacgtcgacgccacgggcttcatccgctggagagatggcgagcgtttggcgtatcacctcatgcactcggtgagcttcccgaagacacccgatctgcccaaccgcgtgcgcggcaacatgtccgcgcttgcgttttggcgccaagttgggccgaacactatggagctcttcggtacggccgtgatggaccctggtggtgacatgatcaagaggatcgctgtccccaacatggccggagtcttcttctgcacgctgaagtacgcctactgcggccagatgaagaagctcaacttcatgctggacaagaaatacgccgagtccaagctacatggcgctccaaaccggaagaacatttgtgtgacgtgctcggccccgataaccggcaggagattgggcgactttggcaagagcaacagcacgtgcaaactgtgcttcggcttcgtgtgccacgcgtgcaagatcgtccgcaaactgagcttcgtggacccagatctgctgctctcgcagcgcaaggtgacgttctgtactgcgtgtattagtgaggtcacgagcatgagcgccttggacgtcgcgcgcgcgcagcttctggccactgggaaggtctaccgaccgcattcgggcttccagtcctccgtgtcttcggacggattcagtactaatagtatggtgtccgactattaggcatgcttggccgaggagcagacttgcgtacagctgctagttggaactcgatatgaactctacctagcgtcgacgaacctgttcaacgtgcttagtttcaatgcatatgaatttctctcgtgttgtggatttttaggatctggtcgattcaaatacatgtacatgtagccgcatttgttaggacaaatacgaaaatatcatgtaggtacgtgagtgccaatccacggcggtttttgtctgggtgtggaagagcacttcgaggtaaggtaagtggggttgcgacgttcttgatgtgaacctcgccgaaacgtctggcaaacaaataacgcaggcgacaagataacgcgacattgctttgtggttggatttgtctcagaggtctacagtagcccgtttggagtcttgtacaccgtcgcccgttaccatcaatcaccccagcaccgcgcgggaatggggcggccattcgggaattggcttccagccttgagtcctctgcacgaactcaaaaatgcgtcttcgttggaaacgacgcagcacttatcgttacccttcctgttaggttcgatcgaaccgcccgacgcggcgcaggccttctgggtgaagtcggccgtcaagaaacccgagctctcagcgacggggttaccattgctgtcagagaccgctccactgcactgcaactttgcaccatggctggaggaagaggtcagaaaacatagcaattggatccagccattgacaggcacttacacaggcaacatcacagcggcgagagcagcgaggacgatctggagcttcattacgaggagcgtgcggaagtcccaagtgtgcagcaggtgaagttttcgggaatgacctacaggtatgctggtcgacgccgtgccgaccggcactgccagtgtcgaaaacggccgcgagcactacatacaagtcgtagtagagtacaaccgtctgtagtgttgtttgcctatttaagcgctgactcgccaattgcttacatcagagcctgacctcccttatgctatagcctatctaatgcgtggaaatatgattgttatgtaagcaccgtagttcctctctaaaatcgcattattggaaatgcttcgtttttgttaatccgtatccaacccaagaaaaggctcggcgacaacggatgttatccgtgtgatccgattgcgcacgtgttatacgataccgtagcgtacgtgttatacgataccgtagcgtacgtgttatacgataccgtatgttacgcacgtgttatacgataccgtagcgtacgtgttatacgataccgtatgttaccctatcggatcacacggataacatccgttgtcgccgagccttttcttgggttggatacggattcacaaaaacgaagcatttccaataatgcgattttagagaggaactacggtgcttacataacaatcatatttccacgcattagataggctatagcataagggaggtcaggctctgatgtaagcaattggcgagtcagcgcttaaataggcaaacaacactacagacggttgtactatactagtaatacaacttgtagtgctcgcgttacggtccgtaacacatatggtagaatatcatcaaatctccgatcgcacttaagatgataggtatacaaatccccagtcaagcgcggtcggagcataacagtattaccctaccccttcccaaagtgatatgcatacacagtccaagaaagattagtcgtcccgtttgctcattggtcggagccttgggatggatggcacggagcgagcgtagcgagcccccgcctgcggtttgacagtccgtgtgcgtagcacgcggctacaaacccaggacccagcagtgctctacctagcaagcgaaggcgacgcgtgcgagccgcagcgggcttagggttctggtccagcgagcgcagcgagcctttaggggttttaggttcgcgcgtagcgcgtagctgggtgatagttaaaggtgaccccctcctatccgcatgttttgtgttcgagtcggagaaagtcggagggtcggaggtttttgggtatggaaacggaaaatgtacagcccatgttttcggattggagggggtgaaatggcccgcaaatctatcgtgatgcagagaccaaatcggcatcagtggcgtttgagaagcatgaacaacccgcaaacgtattaatagccccaagcaaggcttaggtctacagttccctgcctagcgctgggccggccttctaaaggttttaaggacaggtagagccacatttagcagctcgattacccagttcccagggatttgcaatagatttgggtgccatgacacccgtcctgaaaaccgaaacagggatgtccatgatttcagcatgttttacatgtttggagatcttactcggttttagtatgtctttatccctaaccctattccgaaacatgggctgttgggccagccatatggaaacatgactgtaacaacatggatgagtcctcacgcttaacccttaccactgccaaagatgaaaccacagtgcccgctctgttggggaaaataacagaacccgtggtcaggggaacgtttttaacactgattctttcgttgaaaggcgacaaaaacagccgatttgcctgaacggaggtgcctaattaattggcactccctctgatggtgctgtaacttggcaggtacaatggtgagggaccatacagtaatacggtaaagtttcacgaggaaaagactggtggttcatcagatattcggtcgggaagagcggaatcgacttttttctctactaggaattaagcatgtcgtcttctgataaaacatacctctctttctgtctaatttgtgattgttttaaaccgtatagcgactaacgtaaacagtaatgttagggaaagaatggtccgtggctgtgttaaaataatacagaagtgaaaactcgaggccgacttagtagttcacctacccctgcccatctctggaacacccgaccgagaaccagcacctcaatctcagcaggaaagtgctgtcaaaagcggctcgggaggctgtgccggccgagattgaagtctatcgcgaaaagctgctgcccattttttcgtttgcggaacagctcgtgtgttttggacgagaccgctaaggatgaccgccattctcagcggcggtatggctggtcgaagcgcaacacacgcgcagtagcaaggatgccctttctccgcggaaagagactatcgattctagctgcactcgacgtccatgggtttatcgcgtgggaaagtactgaagggacgtttacaagggagaagtttcacgctgcttttgtaaagcacgtgattccacgacttaacccgtggctgcttccgcgctccattgtgatgatggataacgccaagatacatgcgtatctggagattcaagatgccgttcaccaatgtggagcccggtcgattttcctgccgccgtactgcccacaactcaatccgatagaaccttgctttggactgctaaagcgttggcagcagaagcatgccaacttggttttccatatgtacccagatcgagttttggaggtcgctatgcgagcgtgcacacagcgtgcagataaaggttgttttggcacttttcaccactgtggttacatggccactgggatccgtcaccaataatttgatgagctaatgcaaaccagtgctggatttgagtaactatcagtacaaacatatttctctttactcttcttaactgttcgcttgcttcagctagtccgtggacatttcttcgacatgatcttccgtggacatttcttcggcatgatctttatcgtccatgcttgcgttggttggttgagctggtgtgaactcgtggtacatcccttgtgaaaaaatgtcatgatcaggcagtcggagggctcagcggagggacagaatgccgacttccagcggcatccacagcccgttcatccttacctggatgactgatgtcgctggggtctcgtgctcagcgtcgtgctgctgctgtagggcctctcgctgtcgatccaactccatggcctgtgcagttgtattgtcttctggaacttcgaacggcgctgattccggccttcgagcgttaacaacatcgaggtggtgctcggtgatagccccgaactgcacagcattggctacctcgaatgccattctctgtacgcgagcttgctgaacgcgacatgccgtggcgcggtgaaattgctccggttgtgcggcacgctggacgtagaggaaagcttcaaaccgaaagtcgccaattcgccgtagatcatctggcgtcagcagcttccagcggtactttagagtagggaggaaattttcatgtgtcagctcgatatattttgcttgcgggtcgtttttggttcggcgtaggtagattgagggctcagcaggtagtgctagcggcgttttgggggcgttagggcttgctactagcgctgtgaatctagcgatgcacttctccttgaaaacagcgtatccctctccaacttcaaacttgacgtcacttttccacccaccgcgagcacgaccgagtggttcaccaactcgaattttcagtagtgcaattgctttgacaggtaacgggggagagggcattgactgcccatggcacatcctccgctagctgggttgtggcgctcgacggattatctcgcgatgcttggcgctgcaaaatcctagccgaaccagcacttgtatcagcctcatgggcagcagacaggggcaacaaagcggtcgcagaactatctgcaactgaaggggtatctaaggtgtggttaacgtccataatgtcagtaaaagtaagatgagagagagaaacctgaagtgctgcaaagccctccttgcaaatagaagtatgacctaaagtttctgtaatgcaaaacagcaaagcgcacacaggtgagaatggtatgtaccaagaataggcaatgtctattacgtaccgaaatatgctattctctcgtcttcagaaccaaagcccgcgtcctcggcgctgttcccaacatccctccggtctaatccaggccacgcagggtgatgaccatcgccgaggcggacaacgagccgccggagaggaagactcgggccgggatggtgtgatgcatatactcctgcgcgatcacgaactagattgcgagccgcgccgtccccacgataatgtgcatgagggcgaccaacgtcagcgccaaggtgaagaaacccacagacatgctcgtggtgcttggcgtgcagctgtcccggtacaagagctggtccatcgcactgtcgacctcctcgtcctgaagccgtgcagatacttgagccacggtttcagcacgtgcggcggcacctggtccaccttgttgagcaccagcacgagcttcttgccgtggcggttgccgatggcgtcctccatgtccagcgtgcggcagcccatggggtcgcgcggtctccatgccatggcttcactgggacagctcccgacgtcgcctcagaagacgaacaccagaatgagctgtacgagcgcgaggtcgtgttgcatcatctgagtcagcgagatgcacagaaaacacgtcgccatcaggcagttgggcgcgctgtgcgtgcagcagccgcagagaccgacctcccacttgccgaccgtgatgcccaggtcgtccttgtaggttagctcgtcttcgacgtggatgtcgatgggtcttctgcgcgacggcggtgtcgatggcgaggcgtgaccgccgcttagcttgcgtaagtagtgtgcgcggcttggtggggctctccgctcttctacacagtaatgcgcctccgtattgtgtcccgagtgggaacggtggtcaccgtctcgggtacggccgcggccgtcctccggcagcctgtcaatcagtgcgtggactactactcgaggatcagctgttcgaggatgagctgactgagcagtcatcggactttagctaggattagctggcggcgggccagttgcgtgggcgaagagtcgtgatggaagcagtggcgtgttccgcaagtaggcggtgacgtgaggagacaggatggaggtcacgagcgctgcgtggctcggggcgtgagccttgacgtgagccaagggcggaggggtgaaaggaggtggccatgggttcgggggcggcggtgtgtcgacgctcaagttgaagagaagcacgagagagcgcggggcgcagtgctccgtgccgggtaggttggtcagtcgtaaatttgccgtggaaacaacaagttgaatctttgcatttaactttgttgtatttcataccgttccttacttgtccgtaccgtcctacttcgttctcgcagcggcagccgtcccttccagggcgactcgcgacaattgcctgcacagtggacgagcagacagtggtgggcatcttgtctagataatgcaggggacgtcagtttcactacacgtgggatgactagcttgatgcactcacgtacctcgttcatgcagctacaagcacgtcatgttcatgccgccttcggcttctctcgctggctgctcggctgtggttggctacgatttgggcctccaagatagagtgccctaaccctttaacgagctcgttttagcaaaacgggtccgtccaagatgagtagctaaaacgagcgtaaaaaagctgaaaaccacaatcccaatctttaggctattacaagcataacaacaaaaagagctcgagaagcgaggtcgttaccgcctcaccactgctactacgctacaggttgtgtgttctagttgttgttagtagtgtttacctacatatttagacacagcagcactcgaaatacataggtgcggatatagttggtcacaatcgttcagatgtggcgtcgcctttcaacgcgagaatcagtgttaaaagttcccctgatcacgggttctgtttaaaaactacttacttctctgtcccacccatttataggtatttcataaaacggggcatatttttgcttctactgcatattttcgagcaagtgaggtcttgatacaaagcttacagcaaggcgcatacgcttgattttgctgttcacacctgtgcaagaattgatgcgatcacggcaggtttactgctaccggttttagtccaaacaaaggttttttcgtaattctaacaaaaattagcgataattcatcagaatttcaggatggctgatcttgccagtcttacctttgcgaaccaatgaaacagcgtgaaaagctctcgtgaccgagatatttcgcctcaaaaatcgtgaggtttttctgaaatgattagccaaaaatacaattcgtccctaaccattgtcaaaagaccaatcagattcaacgtggggcacacaaaaaaactcactgactataaattcgtgggacagagaagtacatgttaaaagtgcagaaggcatggtaaaaagtgtctgatgccgatcaagttttcgcctccctgttacggtattgcaggttaaacagggtatattttattgtgctttgctcccattctgtctaaacgaaggcgtaaatcgttttgtattttaacttcatcgtaactcgttgttttaccataacccaacaacgcttatttcgatggtattggctaatcaccaatacaaaaaaggaagtcattgtttcagatggtttcaccagctaactctcccctgcacaaaatcattgtgggtagggaagcgagatttagctttgggatttaccattaccggtgcggacactctgacgagcacacctactcggcctattcgccggagtccgttgcgtctgatgtgaccagcttgatgcagaagatcagcgcctcggacccaacttgcagcttcgtgttgctgggaggtcctcgaagtaacgtcagggggccactgttaattgcttgctgtgcatggcgtgtgcatgacatccacaccgcccttaccgaggagcgcgtaacagcacacatgtacccaaacactgctacatttgggaggcaacatgcatggatcataaattgtaatcaaaagtgctgcgatcctacagcagtcacggagtcaagcgaggctagacgagtgcaaaacgcctctcactaatgccgccgaaaagcggcaaaattaataaggggtgcttgctaaactggagctggctggctgtatagccctaaccgcatacatcattttggcgccatcctcttcgctacagtatatcagagctgctcgatattctggaccccctatctcgggattggaggaccggtttgccaaaatcgctgaaaaccacaatacagtaacctagatggctgctaaccatggatgagacagagacacacgctaacaaacactaccaaagatgaaaccccagtgcccgttcggttgtatcatagcgtgttagggacagttcatacctaaataggcgaaaccatgaaggtaacaagtgaagcctggccggatttcgttgttttcgcatgagcaatagaagttaccatagtgctgtaagtgtaattaagtacggaagctctgtagccccacatgagcacatgtacaattaaatgggtctcagcaaagtagataccaatgtggggcggggacggcatgaaagcttatgcgaattttctgttaatacaagctggttggggacggttgacgaggatgtcggacgttctcttgcgctattccagcgtacacggtgaactcctctcggcggcttttctgtgccatgggcggcgcatatctgtaggtgctaggtgttgctccgtcgtgcacagtattggcaatgagacgcaagcacaacccgaataaggtccaggaagtgtctggtcaactacgcaagctacaacaactgaaatacttacctaattacgatattgtgcttttcgccaattctgtcagccaattaggctcaataattcaacgtcaaatattagaataatcattgagtaagcggcttgccctgtgatgctcaagcggacagctcgactaaagcttgatttacacgggaaatcgtggattggcagtagcaaatgcgccattccgacgataatcaaagcctaagcgacactcgccttttgccataccagctatgccatgcttcagatcaaattgccgctttcggtacacattctggtagtgcccttccttaccgcaataatgacattccccttccttccgcttgtgtccgccaccattattactccctccattaccggtacttgtcttggctcctctgtactgctgaccgaaattattgtccgtcttctgcttcttagccatgtgcaggatctttccactgtcttcctcttcatggaaattgtcactgagtcaactaacgagacctcgcagtcgctgccgacgctggaaggttgaagtcggccatcagtgcaatcattcatgagcgtgatgattttcggtacacgagtgccgtttttctagttgtgagtgcctagaagcatggaacgaacacgccgctcgtcgtgtcgctcaccatcaacacgatgtattgatagaaggtagttggaacacaccgatatatccggtcgatgcacatctgcgacccggggttccgaaggagctcaaggaggcgaggatgaccccaccaaataattcgcctccaatgaagatgcggtgaatctgaaagaattcagcgtcgttcctgcgacaagacgggggggggggggggggcgacgtcaatcatgccgtgcatactaccaccgaaaagatgacgacgggtgtggtaccgctttgcatcacttggtacttgcaccacgacatcgttgtcccgaacaaaaaaactaggctctgaccaacagctatatctgctgaggagaatgcgagagatgcaataatgccaatcggtcgaccttgtatgaactggcctgttggaatatctctggaatgattgacgccaacgtagagatcgtcaacaggaccaacaacccattggaggcgtacaacagaagattagccgacacttttggcgatgcccaccccagcttgctggagttcgtgcaggtgctgaaagaagaagccatgttttaaattgactaactatccgacgtgcgccaccgccggcagcgccctcctcagcatgctcccgcatccacgtaccccacagccccgcgcctgcgctgattactcgctgcactctaaggtatatgcacgcatcgtgctaccataactcggtagtgttaccgtgttctctggatgttttccatcctggtctcagctgtgtgagcaggttcgagccgcgtttctctcggcgaacaacgagttccgccagcgctcgcgcttccttgcctgtaagcaaggggagcgcgagctgtacgcgtacgtacaggagatgcgcacgttgacagcctcgctggtggggaacccattgtcggaagacgtcaagatgacagtcttcgtggacggcctgaaggtcggttctgcgctcacgcagtgcgcaccgccactatggagggggcgataaaagtacccatcttaagcaaatttcttggattgcatcgtaacactaccgagttatggtaactcggtattgtgggttctactcaaactttcctcgtgcggttgcaacgaaacattaaattgtaactcatggttagaaaatatttatttgcttatccaactaacttgtaatggtttaagtatttcccgggctaatcttttgggcacttttgggtacttcgggcaatcttttgggcacgaataaaccgaagcctggatgataaatgatctagcaacttcaagtacgtcgcgatggtaacacgtgtagggtaagcagcgccaagcaacggcaggtctgccaacgtccggcaacggcaacgtccacacgaatcaagtctcagtacttcatgtagatcatcttcaacgctgcaatgacgtattatctgggttgtcatgttatcttaaataatcttgtcgtcaagtgaagatgaattcgagtatttcgtgatggggtttttgtagcgcgcataccctagtgttcgaaaccattgattcggttcgagttgtagctgcatagtacgcgtttgtctcagcctactccagagtgcagggcatccccagcatgtagaacgtcgtcgaaactcacccacacaatgcttagcctcatcacctctacgtatttagaagcatgccttctagcagtttcccgtcatttgaaaaacaacatgcttgagcaagacagaatacaccgcagctagatgcatcgctctgaactgggtacttcagtcactccatgctcaccgttggggagtaggttgaatccttgtcgttgactgccaggctgcacaacaatgcagcaccgtttcgcgattacctgctacatcggcgcttttcgtgtgcatacaatctctaggacccagttttgcagtccataatgatcccaagggtctcaagagtgactcgtgttcctagcggatcgcacagcaacactctgacatctcgtggggagatttggacaggctcacccgctgaattcagctccacgatttcgaaaatccaatgcttattgaggcctggtagataggtagaacgatatttctgtacagtgcctgaaaagtattttataatatatagtaatgatattatcctacctcatttatttattattactgtattaaagtatccagtattaatgatattgagcgtgatttattttttgtatgacatagttagttcttcatgttttgaatgcattgtgtacaaatactttttccaatggtaatagcaagatccagtgttttccgagggcgcatcttgttcagtggttccagaaagcgtttccgtctacttcaagtgcaagtactataccggtaccccgccagaaggctttgagtggctaaggcaatctcgtcagccacttgaagtaaaagatccccggctatgacgctgattatctcgcccaggccagctctaggaccgggaacctacactcctacggcttcgtgagcgtcaaagtcgcgaacgtgtaccactggctggagtgggtggccgaccgcaacatgccactgtccgaggtgcaccacccactcgcgtgttcgatgtcgcgtttcaagcccacctactccaataagctgcgagggtacctcgctgccacgaccaaggctgtccagtaggccatcgctgcagtggctccgcctgacgttggcgtcatgttcgtgctttggagagcattacgttgttgttttcgttgtcttttggcttaacaacgaggtgcactacgtgctgtcggctgtagcccctcgaccaaacggcagcgtcgtactgtgctttcactcggaacatttttggtattgttagcctatcagtggagggcgctgtagtttctctgaagtgacaattgcgataacaatcagcggatagctacgcttctcggcgtcccattggtgggttgtggttcccatcacttcaatctgacgacaaaaaaacttctttttttttgccgagcacgacgacgtggttggagcggtgtgcgagctgatggcggcgcagcgcacccccaagaaccgcgccgagcttagccgacacccgggtctggtgccggtgagggcgaacgcaacgcggtggagcccgacgttcacaatgctggaacggtacgggcgcatccgcgatgagatcaagcgcgtgggcgccgtgtacgacctggtgtctaagccagctacccatcgccggattatcgcgctgacagagattttaacagcatatgcaagaagcaccctcagcatgagcgccgtgcgcgtcctcttcggcaagatggcggagatgttccccattacaagtccgtacatgtcaccggatgccgacatcgttcattctccggtgtttgagagcgctgttgtaaaggtaatcatgttgcgggtgcttttttatcctaaagttgctcttaatactaatgctgctgtatgatacactagattgctgggaagcgtgaggccgagctgtggcaccgtttgagctcagctctgcggcgaatgcacccgccgccagcacgcagcgctgctttgctccgatgatgtcccttcggaagctgggccacgctacagccttctcgtcagggcgattccatggaccagtaactgctgcgagagtcacttctcgcagtgcaagcttgtgatgacgccgcagcgctcgtctctcctccctattaacttcgagatgatcgcggttttggtactgggacgcccacagtccaatgggcattgaagttgctgataattagttgcggtaatggcagctctagctcaatatataaatacctattgtgcagttttttattattgatctttcaccatttattaagtatcgttgtaagacttgggcatcctttggttttttgtaatgtccgggcactgtttctgtctttcgacatcggttgattcggcagtttgaaagctatgttgcgcacatccactgggtcgaccatcgaccttgtctcggtacgtacaaatatttcggacgagttccgtgtatttccgatgatattaaaaactacaatcagtgagtgatcaaggttccacatcatttaacacgggaagtattacttatattaagaagccgcatacattgctctcgatgaatgctactgggatcggatatgcttcactttctatgttctctacgtagtttgtccacctcaccagtccacttcctaaactggtcaatatttttagcaggacgaggagtagagcatgaacgtaccaggaattgcgacctggggggggcttctcaatttttttccattgagacgcacaggaagccgattaataatcatgaactcgggtcaggtcgggatacatctgcgcctataataaaccatcttctaggctgattgggcaatcgcaggaaacgtcgaaaatcccgtgtctggcactaatttctcctacacatcgtgaaagcgactttgctgaatgcttaaaagttgggtaaagcaagagtatcgataccgcacgcttgtttcctactaccgggaatactcttcgtggataggttgtatctctttgccatcacagatcccgctgcattggctaacgggggatcttctctatcagaacggtttgatagatcagactcgccttgagttggctctattatttcatcttcgatataatcaactgcggggctactttcaaggcaaatcccaggtagatgcgagtcgtcatcccgaagctcaactgctaatgggactaaatcccattccgaacgcacaggctgtaggtcgttatcgtcacaactgaaaattgctcgatccgggcttgcaatatcgctggtatctgattcgaaaccggtagcatcatcatgtatgtgctcgttaagattcacttcccatttcttcgtaaaatcactgaggattgaccttagatccgcaaggcgctcgtaaaaacgatgggagggcaaatgttgcatgtcggtcagcactgggaataattctgcttgaaggttattgtatttctcgcagttagagagaacggcttgctcaaacttacgtggctgagttgcgcgagatgtccaattgagttagtcaccccaggatttctcaaaacgtagccaccaattgagttgaagaattctagcaagaccaatgcttgatgctgaaaaaataactttcaaatacttgaacatgctgcattttctccggaaaagctgtctgatctgaccacaactagactcaatccgattggtcgtgatgttaccagcagtaaatcgttgacgacgtccatagttactccagcgatcgctgcagttatcccagcatcggcgaaagtacgccaggaaagtgggacttatctccgaaacacgcttttcaaaaactgccaagcgagcgttgtaccggatgcatacatcagtgagctcttcgacatcatcacgtagttttaaaggcacaaagtaccctcgcctacgaagtatctggcgaatgtagcgcaaagcgtgaaatggcacataaaataccgaggcttctgggaattatgctgacaatgcggtcatctcatctcggagcaccagtggtttgaatttatgacacgtaccaaaataaaacctacgttgttagtgttgtgggtccagtctagaacgagtgtatctaagcaagaatctctgagcgacactttgaacgacaatacctactgtcagatcccagtcaccttgtataaaaagatattggttgcctttgtgcacgaatacagcaattatagttttaaggtgatcctctgaggtggcggatcccaattagatttcaaatctgttgtggagcgaatgctattgtgaacatgcctattttgatcgcaaaccaatagattgacaccctgatttagcttgatcgatatgcacatcgaccgcgtccttgcgatacatatgggagtgtgtgtgtgcagattagatgatcgaattttgggaaaccagtcgatatagacgcgttcggagcagaattcccaccttttactgggcaatagtgtagtctggtgatgcatatggatcgcaaccgatttaaaccctgatttgtactcttgcatcaggtgggcgttttagccggttcttacaataaccctagcgtaataagaatggataagctcaacaattcataaaatgccaaagcttcatccatcagattaatatctagcgtacctgttttcgcgataaaaaatctgttatctgcttcatgttatttttgattttcacaaacgcgccgagctgatccagtatttcgtctgagaagatggctttgctctttgataagggctacgaacgacgcctcggtgaggttgtagttgtgggagcagaactgtaaataatgcgtgtcgaaacgtgagttgaagatactatgatatcagacatattgttgctcagtaagacacgtaaatcagctgtagttttcacaacccatgtaggctcagctgtagaatttgggtcttgaaggctggtacgacagacctctgccccaaaaactcctttgcactcgcgatatctcgacgcacgcgttgctcgcttccctgttccacgcgagggctacttacatcccagagtgcacatgtatttcggaaacgcaagttttattgcggtggcactgtcccagtcttgaacttggaattccatttgttgcacgagttggagtcacgaactcgatagcacatcaaatgctttttttggaacttgctccaaaattcttctagcttttcccaagttaaaatttccttacccgacacggaaggaatttcccgggaaatttctgtagggagaaaatacaagcagcagcataaattcagttagatagtactgcatacttgaaaaagctgcctacctcctgcttgacggctatgcctacccacgccgccaccaaaaccaggcttgactactttatcactgctgtcttcatcatttgcattgtcatcctcgacgcgctctaatattcagtaaaacattgtaaacaacctaaacatgtgattaatcatgaacgtttggacttacgccgcctctcgtcccagttggagcctaacatgtgcaggtatatatttaagtatatatacaagaattaatacggaccaaatggatcataacgcttaacgtaccgggcgtgttcattccggagcgcgaacgtcgcgttaccgaatctgtaaagcagagaaagggcacggaacaagggaggggtcggggtgtgggggaggaaggaagtgacagggaactggagactgggacagatagagcaaagagcacgaagcagaacgttagccccgtcaccacattgtagcacaaagcattctatcagccttctaggaacgagcgaaattctaaatgaaggaacaccgacagttgaaacgccctttccacgtaacagatgaaacttaagttactgaggttgcagacgttgccgaagttgcggaagtagatataggtgataccgcctttactggattgccgaattcatctgaacctgtcgcttggaagatttatgaagcggttctacgtctaaaagtaccaacaccatttcgagcctacttcgcggcaccgaagtacttagagagtagttaaattcatggtacaccaaacataaaaacgaagattattctcattgatctcgaaaattcggattgagccttatctatttttgtttcgaatatagatacaataagacatttagatagtggtgcctctgcaaagtgataaaatatggtctcccgaggctaacacaacagagagaattctctttttagcgataccgacgacagcgacgctcgcaacgtgtctcccgtctacggggatcgtgacccgagtacgacagcatgacgacggcccgtctctttaggtcgatgatgatagtagctctggtggagatggaagcgacgacaacccatgtaacggggttacacgcacaagtggctacagtcacttgtgactctaacagatacgacgtctgttagaggttcgaagactttctcgatcttggtgtacgtcacaccaagagttacatacatttgcgaccaccatgacgagtggtccatagagacttaggagtcctattggttgaaagaagcatctttcagccaatgagcgacatgcataacagaggaattctgcccaccagccgttggcagacttctagcttagaatattacatttagaggaagtcagaaacataaaacaaaaatagcagttctcatcttttaccaaaccctgctacttggagtctttatcttgtttaaagtatagtcgtggatctcgagtatacttaactcaagtaaaagaacctgcgcttcctcatacacgtgcacatacgtgtaagccgtagtagtgacccaaggtaggtccactgcacctggtagcactttgtagtccgtccaacgaccgactacctaagttcgtacgtcacggcacgaacgcggagcagagaaccttcccatggatacagatgtgcccatggaaagctccaccacgcctgcaactcatgttgcacgcgctgacttcccccacctgtcggatccatagtgggactgtcaacatccattggggaggcggctgtagctacgatgccgcgtacgctaacgccaacagagcaacatggtgttgctctgggttttatcctgaaggtgcagcgcgatgctgctttctctaccacggtggcgtcggagacgacaccgcttgagcaatcgttgaagcaaaacgtgagcaactatgtcggaagagagggcgagcctctccttcgttggcttgtcgaactcgacactgccatcgcggctcgacgtatcggcgacccgttgtccaaggttgcgttcgccatgtcatgtcttggcgggcgagcgagaagttgggcatatggacgccgagtctctgatcctacgtgcttcagcatttcaaggaggagctcaaacaagcgtttgagccgccgcaaaatgagttttggtcgagggcagagttcctcgacctacagcagggtaagcatgatgttcatgcatatgcgcagagagcacggtacttggtctcgaacattgtgaccaccccggtcgacgaggcgaccaagatcgtcccgttcatgaaaggatgtagggatggcttggataaatttgattcgtcggctcggggagccgacgcaccctccgtaatggagtctccgccaatggatggcgtcgaggtattaaagtcgcgtcggttccgggcgccgacgctgcaaaaggtaagcgacatttcgcgtcgactccgggagtcgacgcacccttcgtaacgaagggctccaccaattacaggcgtcgacgtggagatgacgtgtcggctccggaagccgacgctgcaggcagtgcggatagttgcaaatgtcccgcaccggaaaaacttgcatgctgtcgtgcagccgggctgcacgacgaagcgccgggcgaccaagccgggcttaaagtcgctcgcccgcgggatgaacccgccggcgatactaaggaaacacacccgtccacgcctgggcctggacgaggtcaagaatcatgcggagccgggctccgcaggacaagaagacggcgcatgcggagatcactgcgcaagtctcggccgggggccgagcgctacaaggaatgtctgccgggcagacggaagccggacgtcgagacgttgaacgtcttggcgtgtacctgtgcctggttccggtacagggaatggctcgctaatcctccgacgcaagcgtcggagttgacttcgcttccaggtatgagcaggaagcgcttcgcgcgtgacttgcatgatggacgcattgagcagatctgcattctctcggatgccgagaggacgaagagcgagagtgaggaactgaggcagttcttcatggaaacaccactgagagcgaggccatcctcagtgcgaagacgaactaggggtgctttgaagagcagagctgggactcgctgaagtcgagtcccttctacaagattctactggagctcgaggacgtgcttccggaagagatccgcgcggagcttccgcaggacaagggcattcagcacgggattgatctcgtgccgggcacgaagtactgtgtcacgcggcagtggccactgccgcgagagcaagtcaaggctatcgacgccttctttgagagtcgttaaaaagctggacaagtgcgggaatcgaagtgctccgacgttctgtgtcaagaagccacagggcggctggcgcatcgttcatgcgtacaacaagctgaacgatgcgacgataccggcgcagaccccgataccgcgaaaagatgctatcatcgattcgatggtcaagagcactatatacagtgcttttgatctgcttgatgggttctatcagatcttcattcgtgagagcgatatcccgctcacggcttgtgagcacgccaagcgacatgttctggaagtggctagtgatgccacagggtctgaagaaagccgctgcaaccttcaacaggtgcgtgaggtacttgttgcgctcggtgcgcgacttcgcaccgagctacttcgacgaagtgttcgtccacagccgtgctgcggacgggatgagcgacgtcgggatacacaaggtgcatctccgaaagctgcttgcgtaagcataagctctacgcaaacctgaagaagtgtatcttcggggcgagcgagatattcgtgctcggggatctcgttgggaagaatggtgtccgccctgaccctgatcaatgattggccgacgccgtcgaacgtcaaggaactgcagcagttccttggcttggccacgtacttatgtaagtacgtgaaggactatgtgggcacgatacgcccgctgtcacagctcctgaagaaggacgccgagtgggtttggactgctgagtgtcagcaggcattcgatgcagtcaagcagggcttgactgatgcgctaatctcggcagtggcggaccaagatcgtccattcgacgttgtatctgacgcatccgacttcgcaatcggatgtgcgttgatgcagcacgatcgcgagagccgtgatcgtgtcgtctactaccaatcgcgccagctgaagcgggctgagcgcaactaccggtgcatgacaaggaacgcctggccatgaagtatgcactcgcgaagttccgagtgtacttactcggaagcaaaccgttcgctgtctatacggacctcgcgtcgctgcggactgctgtgaagtctccgcacatctcgcaacggatggcgagatagctctcgttcttcgcggagtataacttccgggttaagtacaaacccgaaaggctcaatgtagtggccgacgcgatatcgcgtcgacccgactatgctacgaatgatgccgacgtcaatgccattggtgccatgcgatcgagttcccacgtcatcgttgatggacaacgtgaaggccgcgtacgcgcgcgacgcggacacgaatctcttgctggcctacggctcttcgccttctgaccaagctcgtcagaagctgccgaaacaccttcgtgctagtgcacaccgctatcgggtgcacgatgtgttactactctacagtgcagtcgccggcaacgcggaccgcgttgtcgtgcccaatgaccatgacctgcgactcaggaacatgtacgagtatcacgatgcaccgactgcggggcatccgggccgtgagaagacataccttcttcttacgcgaggcttctactggacccaccagtataaatgggtgcgcaagtacgtccgtgcttgcgaggtttgtcaacgtgtgaagcctgcgcccttcgcgcaggctcccttgcagtcacttctaactccacgggagtgttggcagtccatgtctttggatttcgtgttcggtcttcccccggacagccagggggtacgggcgttgtagtctttgttgaccgcttcagcaagatggtacatcttgctgcggtacccgctgaagtgactgcgaaacagacggcgcgtctgttcgttgacatggtgttcaaacaccatggcatgccgatcgacattgtgtcggatcgagacccgcgcttcactgcgcacctttggcaagaagggtttacacttctggggagtcaactttcgatgtcgactgcagaccatccgcagacggacgggcagaccaagcgcgtgaactgcgtgctcgtagacgtgcttaagagctacgctcactcgttccaacactggagcgagtgcctgccgacggcggagttcgccatcaacaactcggtgcatgcctcgaccgggcatacacccttctacgtgaatgccatgaggcactcaagcctcccgagtctactcgggatggtggctccttccttgagtgggggaggagctccgactgcaccgcagcaaccgcaaaatgccgctgacacttgcatagtgtcagccgcgaccacgctcaagaagaagaacgcgtctgtgtagggcacagacgccgacaagcgcacgaagaacgtgtctgtgcggggcacagacaccaacaagaagaagaagagcgtgtctgtgcagggcacagataccacgaagaccaacgcagaggcagggcctactgctggaagcgagaagaacgagttcagctaggacacaattacattcgtgcagcgaagacaagccgtcattcggtttgtccaagacactattgaagcttctggcgaccggcagaagctgaatgcagacaatgttggcaggggcaacactaatgaattcgagaagggttcattagtcttgttagctacttaaaacttacctaaacatgtagtgtccggcttaggagcaagcaagcttgctccgcgcttcatcggtccgtacggcaacgcctacactatgaacataccgtctagtatgcgccttcatccgacgttctacgtcggacggctgaagccatacctgcagcatgagctacctagctcggctgaaccgaagcagaagattcggtggaagccatcatccccttcagcgcgaagtcacgctggagcggcaggtccagctggaggtccagcccggccgggacgatcgaggcagtctgggagaccgtcgcaaagtaaggaagctccagagcgccgaacgcagcgctctgtaactgctccacgaccggaactcggtcgtggggagacgcgagatcagagtcaacaccaagttgaccacacacggggcgtgtttccaccaccaccgccaccaattcgtgacgcacacgactcaactcaatggatagttgggcgtattgttggtcacagaatcccgagaacgaacaggcaaccggttcgttttcgtatccgttggagaggattccctcccgaccagaatacatgggaggcgcggaacgtcttgctcgaagacgttccgtacatggtgagggcgtacgaagcccaccatgcgctacacattggaaagtaatgcgaacactgttgttaacaacagcgcccgaagacacttcgagggcagattgtggtgcctgcctccgtggcagcgacgcgcttcgcacgctgtcgcgcatgatacgcagcaacagagatgttccccgctgctgcgccaggggtcgtcaacttcaagggtctcgttacggaacgagcgcgctctcttcaacgtcacgcattgactaagcggtcaatggtggttgttgtgccgggaccggcacgtcaaaccttgacggggggatggtgtaacggggttacacgcacgagtggctacagttactctaacatatgcgatgtctgttagaggtttgaacacttcctcgaccctggtgtaaggtacatcaatggttacatgcatttacgaccaccacgacgggtggtccatacacatttaggattcctattggctgaaagcagcatctttaagccaacgagcgacatgcatagccgtagaaatctgccaaccagccgttggtagacttctagcgtagaatattacattcagatgaagtcataaacaagtcataaacataaaacaaattagcagttctcattttaaccaaaaaacactatttggatagtttatttagattaatctatactcgggggcccgagtataattaactctatattaaactaagctattcttcctcatacacgtgcgcacacgtgtaagctgttgcagtgagccaaggtaggcccactacactactcctaatttagggggctgctcgcacccccgggcggaatcgcaccgcgcgagcaaaagagcagaattccgagctaaggtttacacggcgataagggcaagtgcaagagcaattcgaccgacaaggctccaagaactgaccaagggttcgtacgacacgggtgtgagcgtaatgtagacagtcacctcggaggttcgcgtcacatcgaccgcctgccttcaacaatgtcctcgctagtgaggttgagggtcactttccaggctgtgttttcgccgctcacaggatttcacccacggcagctcgccctggcagtggtcggcatactggacgctaagcggtgacggaagctcgaggcacgcacgaggccacctaggcaacctcctgcacgtcggattgtcatgcgagccatgtacgttgcgctagtactcgtactctctcactgctatgcgttgttatcttccaaactagtccattcacattgcacgcatttatttgggggttggcctcgacgacccggctctccggtcgacgctgtcatcctgcagtttcgacgagctgactcctatcgacctggatccccgagtccagcgtaacatctgaatggactactttcttgccccatgacatgtacgtgaaaggaaatgatcgaagtgttttctataattacatatcgtgggcatgttttacaggagtacgataccgtatatgagctctcataattcagagctttctcataatttatagcggagagatagtgcagttttgacagaacatggccatttttggcatgaaaatccaaaagtcagcataaaggggtggaatggtgcaaaaccaaaatacaacaacgcaacttaaaggttatggggtatgaattgtgagcgctcatatacggtaacagtgaagtgtgtgagccaaccgcgactcgttttgtaaaagccccactacctgtgaatggttcaaaccagcgcgctcgcatgcttggtttcctccttcgtaccatcactgtaagaaagaggggcaagtggacttgattagccttgagggttagcctcgatggagtctcgcatatttatctatcctaccacggcacaaaaccttatgaaaggggtaaaacccgtcctaacgcaggactcctacgtaattaatcaagtccctaaaaaaattcttcgcagcgctggctgctcggggactctgagctctcaggggaagaaacgacgagtggctggctggctcttcgttcttctccggttcggaaacccacggttcgggcgtgtggttcacaccactcgtacctaaccgacctctttcctccttcgtgccatcactgtgcgaaagatgggcaagtggacttcaaaagccttgagggttagcctcgatggagcctccccccgagtggagcaagggtgtttcgcgacactcccatgacgaggccttgatcacgcgtcttgaaccataccaggtttcagccgggtatacaccgagaagcaccaacttgaacatcggtccatcagtcggatcactacatcactcttgccggcagcaagtaacgcacatgcacccccaatccgaagcgaatgtgttgagtagtcctttgagggaaggcctagcctcgcgcggcggctttgatgatggtggaaacgggtgtctttttaatggttttcgtccgtgatgctgatgttaggaatggccccagcgactttccctctcgaatccattgttgtcgcgcacgtagacacgctgttgcagctagcactgggcatgtttcgaacggtagtgacggactaccgtaccttggcctatacggtcacctttgtgtgactcgaacatcacgtccacggagtgcgcatcgtcggactctggtccggtctgtaccccacggcgatctcgcagaaccacgttggctgcttttattcagtgcacacggtcgccgctgccggaacgtgctgtggaaaccggtccccatagctccgagctacggtcgagaacgaagaaccccatcacaatcgaaccccacactaaccgagactcaaaacctgcgatgtctatctgctcgtagattttgagcagcatctgtgttgcttccgctccacttgacggttggtgcgcttgtgtccctgagcgataaggtcaaattccggatcatggtagttgagccgggcattcggaactgccttgtgcgcgaagaccaccgctgccatttttccgtcaaaggtctgatacttgttggcgatcttactccggttgtgtccttcggaagcacattgtccggcaaaccgtcccaccatccgtgcttgttgtgccctgggcagctcgtcgatccagaccgggaatccgaagtcggtgcagaaagactcccagaacttgaaattcctggtgtacctccccagtgtcccctcggtgacgctcgctcgtttgagctgctgcgtcttttgttcaactcttctggtccgctcgatatctgttccaaatcgatactattagtactaatgtgcacgcatgaccgtcgctgcaccatgcttcgtggaagtaggtgagtgcaaacgtcgagtcgaaattgggcctggcccaatgcacaacggcgcaattcgtcttgtgcttctatatcgctgcggttcattctacgaatgatacttgcgacgtctccagaatctgtgtgaatccaaacttgacgccaggcgccgttgatcgccagtttgggtccccagctcgtcatcactctttcccagcatcgagcaaccctggcatggccttctggattgtcgaggtgttgaaattcgacgcgttctctgagcttcgtgctcgtgatcattacactgcatcgatggttctgtactagccagagttcgtcgtagctgtgtcgaataggcgcatcggcatgcctctaaactcgttctggaatacgaaggaaaatttagcacctggtcccgtgagttccacccagtgggaattgactgggatatcccaagcgaagtagtatcggttcctcaaaggaaaaccgacaggaccaaagcagtggtttcgaacctgcttgccaaacgagcgatctcaaggaagcaactcgattgtctggtgggcgtgttacgacacgtgatcagctttatcccgattgcaaaaaccttctttcagaggctagtagctgttcagaacagcttgcggagacaacggcagtcagtcgtgtcactaactgagtttctcaagaaggacttggtctggtggagcgagctcgtaggacccgaatacgagcatgatgccgtctctgagacgtgtctctgcttgtttcaatcgatcaccaatatcgacctcgatcaacaggatgtcatcgacccactgaaaaattcagaagggttctgtatatcccagtaccaccgaagcacacgaacgctggtagtgtcgaacagctttgccaaacacggcaaagaagccaggtgacgcggtccaaccgaaaacagccatatcagacacaataccatggttcgtacgcagcaagttcccccagaacgcagatgcatgacgcgcacgtactggaacaaggtgggatgcatcagcgatatccgcaaccatggcgtagacagcgtatcccggataacggcgccgaaagtagcagatacgccgcgcaatgtacacgaacgggtcccatgtggcgtccggggatattgaagcatctgtgtggtcattggccgaaagcttggggctgatcgatcgtggatgatgcggccgtccacggccaagggcaaatcgttcccaagaagccaacgtagccaacgtggccacaatgcatcttccacgttagtagtctgtgagcaacttgtgtgtcacgattgaagctccttggttggctcctgggtagttaggcggcgacggtagggcaccggtccgaagaacagggtccgcccaatgtgggaccaagccgttctcagcaatgttacacagcagctcgagttgcggatgggaggaaagatgctggcgatatagccacggccggagggccctgttcgggcggaaatcctgagaggtgtgacctcgaaacaactcgagggtcccggcgataccgaggcgagggtcagcggcgaggccgtccaatatgtggagatccacctccgggatcgtcagccggcccgacgaagccgcgaggaatgccgtatccatgaaaacgcggacaccaacacgatgagcccatcgacgaagactggtaaatacgtcgaggggtacacagcgttggataccgttgataatacacgaacgaggactgtagaatcgaacggggatggttgatggcgtgccgacgtgttgaccacgggcgaagcaggaggcagggtcacagaagggtagacatggctcccgtctatctcaggagcgaaccgatcacgaatcaagtgagccactacctcgagttccgacaacacgagcaacctggtcgctgcagcatgatcatgaccatcggattgggagacacttgatccagttgaataggtagtcaacacgggggggggggggcaaataccctggccgaatcgagctggacacggccaacaagcgcccgaataggacatagccccactaggagactgcgtatccatggcccagttgcacagtgcatcggcggcgacgttatagtcgcgactcacatggtgaaggtaaaatcgcgatctcccagtgcccatcgcacggatagcggccacccaagggcataaacgcgagttactgcaacggaactccatgatgaccagacgaataactaggctttaatcgccgaaaatgtcagcgcgagctctagggtaattcccccggagccattgaagacttgccaacaggccttgggcctccatgacgttgttggtctgaccttcatcgaatgagcggactgcacaatgcggaatggagtacgtcgcagtccaaacaccccacccaaatgcgcactgaccggtggcagaacggctaccaccgtcgaaggccgcgtatatcacctggtgatccagtggcagtgaaggtgcggaacgcatggaatcgccgaggcacaaaacactgaacgtcggctgagatcccaaatttatgcccagcaaaggtacatgagtgggtcgaggtggtgcgctggcgttagatggtaacgatccgtccgacagcatcccttccaccgtcgcatgtggcaccgttgcccggcaaagcggatgtcatattggtcgcggggggacagatagaagctgagttcgtattaccaggtaactcctatctgcctacaagccctccccaacaacttcatgtccgctgtgggtggccgtatttgtcgagacggaccacgcgaccgtgaccgcctgagatcgcgatcccgcgcccgatcaccaccgctataccggccgaccggtaacagtctgttccgaccttctgagaatgatgcaatcatcgacgacactgctcacgtgggaccacgaccagcagaacaatccaccggtaacgacgatcagtttgatcgctttcggcaaatgaatccacatgaccatgcctgcaccatgcttcgacgggagcgtctccgcggccgttaccgggtaactaaagtgtcaatcaagatgctgtacgccgtcaactttcacagccgccccattggccacttcttgtcctcggaggatgctgggggggttcgtcaggattggactgtagttcacgatgataccctctggggtggccacgaaacagtcccagcgcatgtcattcgcagagctgatcatctccaccgcgttctccacgtcatccaggacgcagctgctgaatggtatccgtccgccgttgcggacattttccgtgcggtacacgatcacgcgttgcatcatgtgccgaagtcggccccattgcaactactcaacgcgatgtgcaacgtctaccaagcggttttttcgggtctatttgaggacattcgtcatggccttcacgctcgagatctcgcaccccggtcatcacggatgcttcgtccggattcccatgagtaccagcagtacgtcctctggttttttaaaacgatgccgttcttcggtctgtctatgatggccacggcggagctgactctcgaggatcgcatcgttccgggctcaatcgaggccgcactacggaccgacaacggacccaacccaacggactacgtggtcgccagcagtcggtcatcccgtctaaaattcgagatcagattccgcccgagaatggagcaccagtgtgcgttcgataccaagtggtcaaggattgcacgttcgatcgctgagcaaaccgacacgctttttgtcaactaccttgagcgccgaagtcgtgatggcgaccgactgcaactgaccgacaggtttggatgacgcggcgagagtagatggcgtcggtggaaagtgtgaccctggaccctgttgctacccgagcggctgcgagggcgacgtcttgcatccgacgaatggctgcgcaagagtctgtgcggagagcctgaacgactcgtagatacacgttcacgacttcgggatagacgtacatgaggctgggcgcgaccacgacttgtgtcacgggtttgtggcgattggctgcgtgagcagcgagacggcgaccgctgggcccggccgcgtgaacgagagcgccggcgcgaacggtgctcacgcctggcgtggccatgatagtgcctacggtcacggacgggactggcgcggtcggaacgaggcgagcgagagcgagatcggctacgacgcgaagcacgcgagcctcgaggggtttcccgcgaaggagaacgagaagaacggccgcgggtgtgggtacgtcctcgagacgccacgatctgtctacgctgaggcgaccgtcgcgctgaattaacttggctcgaatagtttggctctggcatagaccttgttggttccgccgtacttccaatcacaggcgggtcactcgcaggcgcatatagggcctggggctggaagggcacatgggccacgcgagtcggcaatccttgctgcactaatgacacgagagccgagacacgtgcctccatcgcacggtgttgttcgcgctgctcgttaaacagggtggtcatcattgcgaggccagcagaaagctccggcgtcgtcgacgctgccggtaccgagccagttgccggaaaacccatcgacggtaggtaaggtggattccccgcaggaagagtatgtccgctcacaagggtagggaacatcacatcaactggtgtcaataaagtttcttcacgagtcaataatgataaagggtagcccggctcagaacgatcgtgagctgcgtgacacgatggaattggagatttttcgaggattccccgagccgcgcctgtgattggttggctcagaggctcactatgggagagggaggcagcgacacgtggtatatgggaagagcggatcccggccggactcgcgttggcggtgtacaaggtttggtgaccccggatggagatgtccccaagagcggactccggctggaaccaagtaccgaacgagaggcaaagcccaagggagcgtaaaagtgcctccgactggaggtcgcctgctcttggtgcactgtacaacgcaagaggagcccgaccggattgagtgaagagccagaaaccgtgaagctgtccaagataccccggatgtgaagcccaagtggagtgtgatcccgtttggagatgatcatgaatcccgaatggagataccaagataccatcccagatgcgaagatccagtatacaaagtccaagatgtttccgaccgaccaagccgaccagccaagatctgttcggattccgtggaacattgaacttcgcttgcgtacccagtgatgattatacttgctggaagtatgttacgagggaccgcggacgattacgacgacaagaccatagcgaagacaagtcaagatggagtgcatgtaaagatcgacagaagatagccagacagagagagagagagagaccacagataacagataaacagagttcgttttggcaaggatcgcgcaagtcagttggagcagcctaccggacgggaggaccgactaagtctacgtgtgagggcccagcaactgtgacatctgggtcgagctcccgcaacaaagtccagtccaagttggggtgagtaccgggcgacaacccgaggttgatccatcccattccatttcctagttgcggttagctcgtccagaccaggaaggccccgcatttcatattaccgattaccttgtcaccccggttggagtagccccgggtgggaagtattgatttaagagctattgtatgataggaggtatttgattgtgttagtttctcttagtacttgagggtggtgcgcgtgagccaaagccaaccgggattgaccagtatcccggagtccggctggagttgactggagtagtgaccgaccctttcacggtccaaaagaataaggaagggctacgtgtttgtatataactctgtatctgtttgtattgtttggttgtctgagggctgtcagaggcgacgtccaggaaggttacgttctgccctgctacctactgacctacaagtatcaagacaactcacccacggttgaagacccctcgttacgaagacaaacgaacccacagggattgttcacaaggacacacgccaccccggttggagtgtacatttagatgtactatctccggctagggtttgttctgggtgcacccctttcgggagtctgcacccgggacgcaccaagctatacacctgggcggtcaggcgttcacccgcctcgcctcatgcgtgttcatcgtcctaactcggcggagatgccatgccaaatgcataatcgatagggtgaatgtttgtcttctcaccccgggtcataacgtagcacaccgagcgttggccgatgtcaactgtcgcctccgaagtaccgcgtgggtgggggaatgcttgttggagcttcactcgagcggcggcggccgatgtcggagtcgatgtgaggaacgctgaccacgaaccggagaaccgaggagggcgaagccctgcaggtaagccgtggcaaaacccaagcatgaactcgggggtcgagatgctgtgggcccggccatcatccagcgggatggcaacggtacggcggggctcgttctcgtagccgcgtacaaccacgatacagacgtaaggggggcctggctccaaaagaacatcaccgtcatccaccaacgcgatcgcgacgagcgctcatacaagagaacttgaccgcagaggtagacgtccgacgtcttcagcacaaacttggtgtcacagtaggcggacgccacgtagaaactgacgaaccgcacaaaccgaaactcagccagcaacggccgggctgacagctcgtccgacaggtcctgcgctggttgggtgaggcgccagtacgggatccaataccgcacatctacgtgctcgggcagagccgacgacacgtcgacacgacgctggccagggagcaggaagaccagagtggcgagccaagccggcctacgcacgccatcgtcatcatcgacgaaagggctgcggtcggtgggctctagcagcttcgtttcgtggctcaacgtcgcttacaccaagcccgtctagtcgccagagagttcatcggggcactcgaggcggaccgtgcgtccgccgagggatgggttgagcgacacggcccggggcgggttcgccggggcggggctggctcgaaggcgacgacgtgcatcaaattattggcagcgctggctgctcgggggctctgagctctcaggggaagaacgacgagtggctggctgggaggaatttccataaatcagtgattttcactgagatttgacaaaaggattgtaacagtttgcctgaattcactgacgcaggtattgtagtatagtactggcacgttcataccattttcaagtcaaatttggaactatagtaatactacaaatagtacacgtaggtagcgtgctacctacaaaaatactatataaaatagtagtgctcggtggttatactttttgcactatacaacttgtctgttattctgcactaatattgaagcaactttattcgttggtcgtcttgaggactcaacaaaatacaagggtctaagcttctccactattgtcttacatctgccattccgccgacataacccagctttttcgcgatagaacaaagtgtagaagctcatcggacccaggaaatggtgcattccctaaaataaaattatcatttggtttccatgcatccataatacctttagataaaataggttatcttcaatagaccaaggttatgtgaagccaagtacccagccctattaaagtgacaaagtagcaataggatagccttgcggaataccaaccgctcctacctcctctacaggcccttcgtccacggatcctgcaaactcaggaatgagccgcgttcgagttgagcgagattgagcttttcgagttgagtaagagattctgatgtgagatcttcaccttcagcaattcctgtatcttaatttctgagtctagaaccttctaaatagttaaaacccaactttaacgagaggcttcatctgatcggcttcaaatgatcgggtttgtggcacgatgtggaagaagatttttcgccgtacccgtgttggactgccggaaagaccgaatcgtcaactgactgtgactggtcgcagtggactgatatccagtgacgtggagtgttgcatgtggatagtggatgcgcatggtggatttggcgggacccggtgcttgcagtaagcatgggctcacaggatcggagatgtgcccaccggatgagcgctcatattcggtgtggagtaacacatcctgtccgtccgccgacttccctgaccgcaggataagcctaaggcgcgcaagtgcagccagtgaacgtatcctggctgctgcctgcattggctccgtcaagacatcggaccaacccccaagctccccatgcccaccatgctcccatgcgcccaagacctcgctggacgaagaacactgtttgccggactggattgtggtgcacccggtagcgacgcaccggatgccaaggtgccgtaccgaatgaggccggaccggattatcaattcggtctgacccctgctgcccatactggatcgtgaccgcaccaacaacaagtccagtactgctgtgtgtgtagcagcaatccaggaccggatcgaccaagaacgtcaagcgacacaggatggctcacgtgattagacgcagaggtccggtgcggatttgatgagacgccgtacccacgtacctctgtcgccagatgatgagtgttgccgaaggaacgttgacgtcgacaagttgcccgataaccaagctcagtgcaagaagatcgaagtcccgtgcacaaggtcgaagcatatccaagacaagtcaagcatagtgaaacctttattagaagtcagtgaagtgaaacagatagctagccaaacgtaagatcaaacagaaaccaatttgccgagaacacgtgggcgtctttcttcgggctgggaattccccctgacattgacgtcttcaagagcttatacgtgggatccgccttcgtgcgatcttaaaacggaggatgtttcaaggcctcactggtgttgcgagcactggtgtagtggggactcaaagataccaaggcaaagtcggcagggactggggtgtcgcgccctggagtgatctatgagagctttatttccaatttgcgtgctctatccgggcatccatttcatattacatcctgtgtgtcttaggcggtagaggtagtcacccccgagactgaattgattgactactgtgtgataggattgacttatattttgtattgttccctcactctgtgagggtggtgcgcgtaagtgagtgtgcatccagggttgaccagtgccttgggtgacggctcgtaagttgactggcgtatagccccccacccaagggtcttaaagaataagtggtggctgtatattttgtgacgtttagctcggcattgtatttctgtgtgttggttatactgaattgtggacctgactgtggtaccttcgattcggtctgactttctgttcattcggtgtagtttgtttcaggaacacacgcagcagactcgattctgtatttcaacaactcactcggtgaagtccggtccgccaaaggtaaacgatacctataggggttgacacaaggacacacgccaagtccaagcgatcctcccggccccctgttcacatcctgtgctccgaggactaccggattgcagcggatatctctggtactccgaaccgattcggtccggcatagtgcgctatacacctggacgatcaaggcgttcacccgcctcacctcatttgggctgcgctagcagctttactgctttcccagaataaatgtagtttggaaatagagacatcgtaccaaaaaaataaatgcagtccgtgtaaacatctcgttgaggatgatattataccgtgttgcagcaacttgcgcatgctcataacagcaaatactgttcgtactggtgcacgcatttatttcatattgcgcaaaaaatgcgatgcccagttaattatttcagatagaataccagtggttatttgggctttcttagagcaatcccacccgtttgaacaaaaaaccaaaactaaaagcgaacttagcttaggttcgtgaaagtattagttttcaagttgaacagaaccaaaacaaaacctcaacaaaactaaatttgctgcacatacaaaaaccaatataaatgaagcgtcgctactatcctgtagctatcccgcagctatatttgaccgtgctttagctcaccgagacaatacccaacggggtgacgacattctcgttcgggcctacggagctcaggaagaagaaccacattcccatggccagattcatcaccaagagcacgaactcgaagatgatgaaaagctggaactcggactcgaatccacacagccaatacaccagcgagccgaagatgatcgtttcgacgaacgccaacgggatctgactcgccgaggtggccagcacgtaagatgcagtacggaagaagttggcaccgcgctgcttgtagaagacctcgcgctctgccatgtacgtcgggatctgcgacgactggcccatggacaggaacatgaccgaagagaagaccacacccagcacaacggagacctgcgttgggtcgaagtcgtagaagacggtgcagaactatagccccatgactgcgatcatcagcacgcgtccaaagatgaagggcttgttgcggtatgtgatggtgagctggcgcttcagcagcgtcagcgtgctgtcgacgaacgactggctgaacatgggcatcggcttcatgttctgttccacgctgtggagcagttcggggtcgtacggggcctccagagcatacatcgactccatgtagatgcgcgactccttgaaggtgtcggcaaactcactggcccggcgaggctgcttcgtcgggtgttcgacctggtactggtactgcacctgcgtgcccaggtccagcaggtagtcggcgatgtcacgttgaggcgggcacttgaacccgagagactcgaagtactcctcgaccttgctacacgggccatggtacatcagctgaccatcatcacgtcgtcgaacaacgcgaaaacctccggagacggctgaagcagagcgatgacgacggtcttgcgcagcttgtgggccacactacgctgcgtgttgatgatatcgtacgtggccgcactgtcgagacccgtactgatctcgtccatgagcgtcacgtacttggtactgaactccatctcgccggtcgtcacgcgcttgcgctcgccgccggacacaccgcgggtcatggcgtcgcccacgatggtgttctggcagttctggagtccgagctgctggatgatgacgtccgggtagtgtgcgaacatggcgttggccgctctcaaggcctcctcgttttcctctggggtaccctgcgagagcatcttcttggcgtgctcggacagctcagcgccacaaaacttgtgcgcgtactccagtgtctccttgacggtcagcacggggtagtgcttgtcacgctggttcacgtaggccacgaactggggcagcgtcttgatgatctgctcgcgctgcacgttgttgaaggagatgttgccctcgaccgtgatgttcttggtcatggggaccgagcactcagcatcttcaacagggccgacttgccggagccaggttggccctgatctttccaggtgagaacacaccgctgacgtccttgaggatctccttgcgcacgatgcgtttcttcgggctgatgaaggtcttcatgagggtgttggggatggtcggcaactcgtacttgctgtcttcatcgaccacgacaacgtcagcagtgacagacaggttgctgaagcgcacgtccatctggggcatggccaagccgagtgccttgccgagtttggtggcgatgtgctcgtgcaggacctgcgggccctcggccatcaaggcggcgccggactcgtacccgagccgcttgcgggtggccggcgacatggcttccatcgttgtcccttggtcggcttggtagctggacaggaaattcgagaatgaacttgacccggccgcgtcaaacgcggaagggcatcaacgaggtggccggggatgacgacctagctgacagggatgccacggcgtcaaccacaaaggattgttgctctgtagtcatgttaagtgaaacggagaggtgaggagcgttccggtacatctcagtgcaactacagtgttgaagtgatactctaaacctcagtcgcggatccgagccgcgattggctcaatccggcccgattacttcaaggacggtaacaaatcgtcatgaatgcagctccaccaaaacgctggcgtcgacttagcatcgatgatggcaggcctcgctaggctacatgtacggatgcgacacattggccttggcataaaccgcatcttgtacattagctatcctgagcaaaaacctttgcaatcttgagatgcgagcgcgtctgtcaaacgcaagtcactgctgtgtgtagagaccctgaagctctgaattcaggaaccgcgagcacaatcacaacggaataacatagcaatctaaaggctgcacaaatactactgtgttattactatttaccaaagcactgagtcagcagtttcaagctatcccaatcattttgtcaaatttcagtgaaaataattcctcggctggctggttcgggcgtgtggttcacaccactcgtacctatgttttgttttggcattgaggtacattgttgtcacttaacttcgtggctaacgacatcgatgaccttgacggaggtcgtctctaaccgatctccctgctttattacccctagtggctacacattcagggctgcccccaaccgttaaggtgtgaaggccccgaaccccgaagcgttcatatcgctgatgtgctccagccagtgccccacgtcactggctgcgtaggcatgaagatcttcccagatcgaggcggagccgatgactcgagtgggtttacattgcatgctacgccgtgtattcatcgccaggttggcgagcgcatcggccatcttgttgaaatcgcgtatgtgatgctgccagctgatcaccgagagttggtccacaacccgccgattttgccagtatagctgagtgaggtgtttagcctttggtggtcgccgcttctgctgctgatggatgataattttgctatccccaaccacgtggagtggtctccaattgtggcgatgacaggcctttaaccccataagcagccccatgttctctgcaatgttgttcgttgtggaaggtacatgctgataacccagcagatttcgaaaacaccccacccttcgccgacccgaacgctccactccctccaggcccgggattaccacgggagccgccatcaaaaaagaggagatacttcgaacgtccaacaaatgttgctggggttggcacggccggaatcgaatgaagcgctttgcgcgccacttgtgccgctcggtcaagcataggagcgtgtggaccccgggcaatgtggaggtgcacagtggcatatccgtgccgcagtcgagtgttgaagatatccagatgatagtcaaacgacacattattgagcgggtcgaaaaaaacaactggccaccgccacactgcgtgaaaagagagggccgctccgattctccagcagctatccatcacccgcgtgagtgcgacagtgagattgtccagcgcgaggccggctacggtcgggaagagctgctgcgcaattgtccatacccccgcagggatcattggcagcgtgaggccaaagacagcctcctccagccccgacgtaggcaatcccaatgtcatccaactctgtaggaaacgcgtgcgcatccgaaccgctgctggacaactccagaatacatggtagagatccactcggtcctgccgaacgcacaccgcatgaggacatccaacttgttgacgactgcgatcgtatggcgatagcgcctggtgtttgagccgaaacaggagctgctccccccacgggttaagaccgacaatgcgccggatccgtgaccattcaaggtgagagagacctgtcgcagccgaaggactttgccgctcccagtgttgttggcgccgcgctcgacaggcgaagcctcgcctccgcgatgcagcaataatagttcgaaaatgtcgacgcggtttgatccatcgctgattacccacccataagcagaccagacgactgacacgcgggtgcaaatgtacatagtgaactcgaatttcgggcccgactgtcgcggacacgaacttagtcgaggatgactgctgataacgtggtcccgtgagagagccctcgatcctgacgtcagctgtacagatggtggcgaactggaagtcatcctcccgagcaccgggtggtccgctggtgttgcttcaatccgtagctccgagctgaagccacctcgataaaataggcgggggtaattcgtgaccaatagaagaacgagggcctccaccctcttgcgaattgccgatgtacgtcttctgcgggggaatagcagggtgaatgtgataagtccccagtgaatgatatcacggagccggtcaccactcgtacctaaccgaccactttggatctacaaaatgagcattttcaaatctgaaactgattgaaacggcaattttggtttggtttgaactggcggaggaatattccggacaaggaaatcgtttgtagagaaacagtcgagggtgaagcaatggtctcatctgccgtcttggacactcgctagtcggcttggtctcgccgagggtaactcgaattgtcctgcagctccaagcaaggtccaagcagctctcattctcccaatgcaaactgccgaggatgtcttatggcttggggagttgaagcaatggtcttatctagcggcttgaacactcgccatggtctcgtggagggttacaatccagcggttgtccagttcgcaatctacttcgttctccccaaattagcagcgtcgcacttctggtagccgtggtgaaggagcgattcatcgtcaacccgttcacggagctcgcgctgaccgagcacgaccacgagcagctcaaggaactggcgaacaacctcatctgggccaacctcgacaagtacacgacgtaccaggacgagaagaagaagggcgtggatccgcgacgttggaagctctggaagcagcgccaaggcatcgatatgtacgtcgagcgtcaaggaactgcgtccgcgggcgagaacatcacgtgcaacggcttgcctggaacctggggcatcggtaacaaagagggcaaactggacgacctgatgttcggtctcgtcagccccacactcgaagccatgcgcgtcaaggcctcgtacgttgacgacttcagtggagctgctgtgctagacagcatagtcgagccatcgctggacgagccgttccaggctctgaccgtcaaatggatgaaggtcgacatcccctttgcctcaacgaacctggtcaagaaccgcgactattatatacgtgtacatcgatgccacgggcgagcgcttggcctatcatctcatgcactcggtgagcttcccgaagacacccgatcttcccaaccgcgtgcgcggcaacatgcccgcgcttgcgttttggcgccaggtcgggcccaacactatggagctctttggtacgtccgtgatggatcctggtggtgatgtgatcaagatgatcgctgtccccaacatgaccggagtcttcttctgcacgctgaagtacgcctattgcggacagatgaagaagcttaacttcatgctggacaagaagtacgccgagtccaagcagcacggtggaaaaatgtctgcgtgacgtgttcggcgccaataaccgggtgactttggcaagagcaaaagcacttgcaagctgtgcttcgggttcatgtgcaacgcatgcaagattgcccgtaagctgagcttcgtggacccagacctgctgctctcgcagcgcacggttacgttctgtaccaggtgcatcagcggggtcacagtatgagtcgcccgagcgcagctcctggccagtggcaaggcgtacaggccgcattcgggcttgcagtcgtccatgtcgtcggacggattcagcacgagtagttgtatgatgtccgactaatgttattaggcaattcctagcaggtatgtgtgcagctgcgtggttagaactttaaacgtcctctacctagcgtctgccagactcttcaacttgctaacttgttaacttcgcattattctttcgtgctgtggatccttgggatcttgtcgaatggtatgcagctgctcaaccttaaggtgttgattaccaaatcgcttagttagcgagaacaacgggtacactacttcgagatattgcagttgtggttgatacttgtttgcttgacgtgctacaatggaaagtctagcctgcctttcctttccggttggagttgagttggggtgcatgtatcatacttaagtaagtattgtttagggcgattctgaggacagatgacgagaatctgactgatacacgatggtggtcgcgcagctggctgatatcttccctgccgcgacctccgttcgcaatcgacacagacaaccatccctcactttcatattctcatcgatccatccaccgctgctagggcgtccaagagcaaaagacaaaaatggtgaaaggacgcttcatcgtcaacccgttcgcggaattgtcgctcacagagcacgaccacgtccagttgcaagacctcgccaactcggtcatcatggcccacctcgacaagtggtccatctacaagtcggagaagatgcaagtcgaagtacttcgcgctggaaactggtcaaggagcgccagaacatccgcatgtacaccgagcgatcgtcatccacaagctccggcgaactgatcaccggcaacgggttaccgatcatcttggccgtcggtacgcttcagggacaactggacgacctaatgcacggtgtcatgagtccaaccctcgagtctatgcgtatcaaggcgtcgtacgtcgacgactttgacggggccgctgtactggacacgctcgtcgagccctctctcgacgacccgttccagacgctggtcctcaagtggatggaggttgacatcccgctcgtcaagaaccgcgactacgtgtacctcgaaggcacgggccacgtgcagacccccaccggcgaacgcttggggtaccatgtaatgcactcgggaaacccaccacctaccgaaccgagtgcgtggcaacatctcggcgctcgccttctggcagcagactggccccaacacgatcgacatgtggggtacggccgtgatggacctgggcggtgacatgatccgcatggtcgcggttccggccatggtaggcgccttcatgtccagcgtcaagtatggcttctgcggccagataaggaagctggcgtgggtgctcgagcagcgctacgaggagtcgaggcagcgcggtacccccaacaagacgagcgactgcgttacgtgcttttcgcccatctcggggcggaagctcggggactttggcaaaagcaacaacacgtgcaaactgtgcttcggcttcgtatgccgcgcgtgccaactcgtccgcaagatgagcttcgtggacccggacttgcagttgtcccagcggaaggtgacgttttgttccgcgtgcgtggggcaagtgatgtctttgagctccaccgatgcggccagagctatgatgctcagcaaaaagggccactcgaaagtccacaactcgctgtcgtcgtcggcaagcactacctcaagtatgtccagcatgtcgatgtaactagttaagcgtctgcgtaagatgtcgtttttgagtttcagaaatttctattgatttcattacctatgttgctatactgtataactgtaatcatacaatgtgcaagtgaattttgatgggtaacgctggtaaactgtagcagctcttttttaagggtgtccagcgcctaaagagtgccaccctccagacaaaaatccaagggatcaccggactcaagtgcggcgcagtgcggacagtgtcaggtcttcgtggcgtacaatgcactagcgtcagtgctcgatacccctctgggacagtcgatatagggataacttccgggtgtctgcactgagtcaaagactccggctcattctccatcttgccaccgagatagcaccaccccaaagccaattcgtcggaatgaaggggcgattcgtggtaaacccgttcccgactgtgccgttggcgccgtccgaccaacgtcagctccatgacttggccatctcccttgtgaaggcgggattggagcggtacacggcgttcgtggagaaggagcagcgtcaggtggatctgtcgcggtggaaactggttaagtctagagagaacgctcgagtcttcatggagaagtccgcttctccccgctctaatggcaaccaagagacgcgagatctcccgtcgttgttgtgcgttggcacgacggctggacagctggaggacttgatgtttggagtggtgaacccaacgctggaggtgatgcggatcaaggcctcctacgtggacgacctcagtggcgcggcggtgctggccactgtcgaggagccgacactagacgagccgttcaagtcgctcgtggtcaagtggatggagctcgacatcccgctgcacactacgaacctcgtcaagaaccgcgactacatctacgccgaggcgacggacatcctcacgctcccgaacggtgaccgggtcggctatcacttgctgcactccatcaacttcccacagacccacgagctcccgaaccgaattcgcggtaacttgtccatctgcggcttcttccggcagattactgagggaactacggagatatatgttaccggcatcatggacccagcgggaggtctcgtccggcacttggtgatcccgaatatggcgaataccttcctgtcgacgctcaagtacgcgcactgtggacagatgaagaagcttgcgtggatgctggagaagaggtacaaggagtctcgactgctgggcaaacccaacaagaaggcgcagtgcgtgacgtgcagacattcgatcacgggacggaaattgggagactttggcaagacggacgccacgtgcaagctctgcttcggcttcgtgtgccacagctgcaagatccacaagaagatcagcttcatcacgcccgacctgctgctggccaagcggaacgtgacgttctgcggcctctgtctggccgaagtgaacaaatccgacgcgtcagaggctgctagagcccagatcttagagagctacccagttaaccaccacccgtcgatgtctacaacgtccgagacgagcaacagtagttagctgaagtttgataacgcacgccatttttttgcctttgagactcgcacacaatgcatctgatggtgctgagggcttgttactctgccgcgatgaccacgaggtcagttatgccagtgtctttagtgactgagtaacttgaggcgtgctagcttcccgccaatacagctggggccaccaatattgcgacgcgaaagcgaagaggtgttcactgcgggaaagcagtgtggtctccttccagtcaaaaggagcacgtcagttcccttggctcggtcggctgggggccaggcaagcaagcaaacctccggctacaactacaactgtaatcacggatggcgagatcttcgactgataaatcgagaggcgaggagtaagcatcagccaacccaccatagccttttggcttgacgccttgaatcggtgaacttcagcgatgcaaagcgagattaagcgcgaccttcaaagatcgatcgagcagctcacctggatcgttgaagctcgacgctgtctgcattccgctgatggtcactgcaacttcagaaaataaaagtgcactgcttgcacactatgggcagcagtgccgggaacttcttggggtggttgtgaggggaagatggccacgcgcccctgtcacgatagaccccgaggcctggaaggccagctccgatgatctctcgagttaaccgcggcctggcgatcgatcatttggcgccagctgccgcagcggtacactgcgtgacctccccaccgaaaggcaacgagccggaatttagacgggattaaagtattgcccaactaccttctaaatcacatgcggacataaattgacggttggatacaattgctaactaacgcgacctctgtaaatgattaaaaataaaagtatcggaacaattttgttgcaggcaaatcactgcgcccccagcataattcctgtttttatccgcagattgcggtcaacaaagcacgtttgcaaggatttgcgtgaccttgagcacgaacgaaataaacgccaccaaagccaacatagcgtttgccttccttcttccttcaccgctcgttgcctttggtctgagataccagctggaagcgagacagaccgctttcgtcattgaagctgcttcagcttgacccgtttgcgtttgccgcacgggcgaccactgcgacgatcgtgaccagcgccaaagacaagatctccacccagcattacactgcctccacagcattgcgttcccctcgtcacacgttatgaataacgttattcggaacccctgcaccgacacaacaccgcagacggccaaccatttccgaattgcccgccggcatcgcagtcaaaagtcttccgacattccgacaatgtgccagaagctgcggcgcgagcggttcaccgccagtccgttcgacgaggtggctctgaccatgggagatcggtctcacctcgaggctctggcgcagaccttcgtgtccgacaacctccggcagtatctgacccattcggccatgggtctcgacaaggtggacgaccggcgttggaggtcgtcaaggccaaggaagctttacgcgtctacacggagcgctcgcagcgtgacatggctcgacgacagcggaagcacctcgctgccaacgccagccgcgcctgcactgacgacgataagaccaagtacacggtgtcggaactgccggtcatgttcagtgccggcaggttggtcggtgacctcgacgacgtcatgttttcgtgaacccgacgctggagcacatgcgcatcaagtcttcgtacgtggacgacgttggtggtgcggcggtgttggccacagtaggggagcctaccttggacgatccgttctgttcactggtcatcaagtacatggagatgaccttaccgttgtctacgtcaagactcgtcaagaaccgagacttcgtctacatggaggccacgggcgtcgtacagctcggccacgggggtgaccgcatcggctaccacctcatgcactcggtgcacttcccgcagacggtagatcgcccccacaaggtgcgtggtcggctctcaatctgcagcttcttccgacaaaccagccccaacatcgtagagcactactcgtccggtactatcgacccgggaggcgttatcccgcgctcgttgctggtgcgagccactgctaatcagatgctggcgccgctgcgttacgcctactgcggccagatgaagaagcttacgtggatgctgcagcagaagcgcgacgagcgtcgagccgacggtgtattctccaaggtgtcggtattagtcgagaacgtgtgcgtgacctgccggtcgaaggcgggcaacctctttagcagcaagtgctgcgtctgtctcggcgaattgtgcatgtcgtgctccatcaagaagcgcctgagcttcctgtcgccggatagtactctagtgcgctgtaaggtgtcagtgtgtactgcgtgtatgctggaaggactgcacgttagcgcgtccagagccgctcgggatcaactgtccggagcttcaatctgctgcgcattcgccacgtgctccgtgtcggagacgagctccgatctatcgccgtccccgacgaattggagtcgaagtcggtacgccaaggcgacagtataggccagggcgcaccacgaccacacgcttgaagatgaagatgaacctttgtcggttctttagtgccgacgctgtataggataacgtattggaaatgtatgaaccaacgcaatcaagcctccttgcactagctttgcttgctcatgtggccagcaatcgatgctgccgaccaccaccggcacctcgcgccatttttccggtggcatggagcggagcgctacgacgttgcgatgaagggtgtgaaatcttgtcggcttgcattgacgccgacagactcgtcgcttgatcaccttgaaccttggtggatgaggaaggaggaatgttcgcagccaccaggtcagtgtagcagttgagctcgcttctttgtcatcatgacgatggtcgcgtccactggttgaaggtctcccagcgtcgtgctgctactgcttcaccgctgcaacgcgagaacaagtacctgcagtgttgggcgtgatcctgctacgcacgttagagcaattcccagcagtaacgtgctcgacactcccacatcgcagccaaaagacgaacgtactaagatccaacagcttgccgcgtgacgatggatataatgccagcattatatttccccacctgtcagaaccatagatcggcgctcaaacagcattcccccactcccgtgcgaacttcagggcgtattccttcactagaggactcgacacctcgacattcatcaactgagctacgtcttccggtgtctgcttggcgcgcacccacttgttcatcatcgaaagttgcagcgttgaggccgcttccttcgtactcgccaccttcttggccttctctagaatctagaacagcgaagtgtccttgtagtaaggcgacaaactgtccagaatcgtcgtcttctgcgtggggtagcgtttgttaaaatcgcttacgtacttgacccaaaactcaaagttttggttcaccaccagaccgtcgccggccttctgacgcttaagttctgcaaagacttttttcgggatagctttctgacgtagaaacttcttcatccgcttgtccatcgccgcccgagcgattttttcagtgctcgggttccgcatcgctgcgtcgatcatgcttggcagatgagcggccaaatgcctatccaagatgtggtaccaaaactcctgcttgcggtatttccggttgaaagtcgagccaagtgctgaagagcggattcgagaacacgttcttggactcctcaagttcaagctgggtgaagacttcactgggggaaatctccctgcgcatgtagtcctggagcttgtcagccctcaatttggcggccgcagctctcgtacttgggtcctgttcgaggatcttcagcagaggcttggttctgtagtgcgccctcagcgtcgtgaacaggtccgtcttcttgtcggggtatttttcgttgaacagcttcaagtacgcagtccacgtgtcgtacagcgggttttgaagaaatcgtcttccgctttgtacagtttcagcagcatgaagacgtcgtccgcagattttccactgctgagccaagcgttcatctgtgcattgcccacttttgtggcgatactgttcgttgcgtcagatttcttcgccagcgcgatcaactcggccaacgtgccgtcggtgtggtgatacaatagtgttgggatcgtcgacgttgtcttggtggggttcttaacgttgaagtcgtccacgtacttgacccaagcggcgaactcgggctttgaaaagagcctctctccagctgcgccgagtgtgaacaggttaaagacttcgtcgggggatttccccaatgccgcccagtactggagttgttcgccttggagtcgaagagcgagcgtctccgtactcgtcaccttcttcgccacctcgatcagctggaacaatccgtcgtcgccgtatttactgatcagagtcgggatagtcgacgtcgccttgttggggtatttctcgttagtcgtccacgtacttgacccaatccagaaacttcgcgttgaagaacaacgtgtcgcccaccttacccaagctcaagctggagaaaaccttgtttactggttttcccttcgtgacccactgctccagtgattccgtggcgcttttcgaggaaatcaagcctttaaacttgtcgacaatggaggcagaaggccccaccctctcttcttcttcttcgtcttcatctgcgtcggtggctctcaggaacctcctggcaggtgcatgatctccacccaaaggaagcaaattaaattggtccgatagcgcggaggctaccgtctccttgctcttcacagacaagttggcatcaatgccagtaaccagagcggcaacagcgaacagcacgacgccacggagccgcatcggtggctggacttgactcgactcgattgagaaatgaaacaggtgtgtgccatacagggtccagaagctgattctcacggacaaccacgtgcagcgagccatcttccccgcccggtcatcacgtttcgtgttatggctcgacagatctcgagatacaccaaatggtacttacatcaaacggtcgtgtctgcagactttcatcatctgtcgaagcaccacaccgttgactcaccacgtcaatttccgaactgggccaaacctgaagccatacacagtcgacgggagagcatgcagacaactgtgagcgaaatccaagcagaacatactaaagcagctggccaaacctcaaatcttggtctaaccatccaaaatcacaaaagtgggacgggcttttcatcgagtaatcgtggcggctcgtcaaggaccgcaaaaaaagggtggctcgtcgaggatttgtatagcagagtaggttcatcaaggcattatgacggaagtgcgccaatgaggatttcggtcgtccatcaagtttccttaccacattgctaggcgaacatcgccgtactgctgttgacgttcagcctgcatgatctttggccaaatttgcttgtacgagtgtttcgcggacgtgcgggaggtctacgccacccgtcagaacctgaagctgccaaatgcgttgatgcagtacctcttcaagagcttgtaagcccaacctgttttcgtccgacccgcatacactacggccgcgccagacagattgtatttaataatgacgcaacatcaacaacttgtatctgtaagcttactgctacgaatcgatgttgcaaccgtaaaaggagttgaccatattgtcgtcctgatagttagttagttgaactcgagcgcgtcaccgagacgcgattcgcatgagtagctctgagaccgtgcgactttgcattaacagcgaggtccaacagcgcagcaccgtgaaggcagtctggctggtcttcccatgcgggctgtactgcaagaccaagcacctgctgaccgagccaagccccgaggcgcttgccgcggtcagccgcccaccttattctcgttgttcacatcagcattgcgtccgtagccgttgtcgcggccttcgagctacccaactatcgagcggtattagcttagccgcttaggatacgacctgcctcgacaacataacaacacacttatctccaacgagccatcacatttggataccacgtccgtagtcagttatacttggcgagaaaactggcacgcattgggcttgtcgccaattataccgctggtcatcgcagcagcattaattatcgtctcccagtaaagaataaaaccgcaacgtacggtgtatgtcgaacagtagtccgatatgcttgataactaccggcaagattcatggaatggtattgtgatacatgtagataagttttgctgtgagcggcagtctaccgaatcgcagtgtacaacagagaactatgacacctgaacgtcaagtacatgcgtggaaggcaaccaacgctgcatcctgcagctgaattcgccgtcacgcatcgcgagaagggtacattcgacggtggagtcgtttaggccagcctggtacccgcagcaacaacggaaatgatatataacggggctgaggggcaatatttcgtactgagcctagctgtatgtccagggtggttttgttctagcacgcacagtctaaaagttgtcccaccgcgatccccgccttcattcgatgccgaggagatgatgagtggcattccttgtcacgagtcgcgaccgaaaggcccagcgtaaaacatgaagagtttcaatatgtattgctcggtggctacttgttagagtaacctcaatgttattttttattgtagtaacgttagcttggaatgcctcctagcctgcatacaatcgattacaaaggcaccgttattgtcggcacagcagatttaaacgagcacttcgaaggttgatcagttaggaagtgggacccccgctgggagcggtttacaccgctgatggttgctaccagccccactgtgcatgtacgcgttgcttgcgctttgggctgtacctgttagggcctgctttccatgcacttgtaggcgacggcaatggcaggccagcaattccttccttggcaaccctgtgatacaagtagatccaacgcgcagctccgctttaagcggagttggcctgataagcggactccgcttatcaggcctaggccgatgtacattcgcgcgactgcgtcgacgtcgacgagatggagcacattctgcgctggagtgcgactacagtgaatattcgcggtttacacttggtctctgatcgctgcgcagtcgtcagtgagattttacctgatgtccacgcagagactgcacgacaccaagagatctcgaagtctcacctggtatgcatgaagcccatcgggcaatgaacaagtctagcaatttgtacggatgatctttttgactcgatttatggccgattatagaaacgcccttgatgaaccaccgttttcaaatcgccttgacgaaccgcctcgttttccttgatgaaaagccccaccccacaaaagttcttgtcatctacacaaaaatgtcggaaaatccccccgcgccgctactcgcggtgaccctcgtcttccggtccaagcccaagttcctcggtctcccgcacatcctggaccatgtctccaccatcctggacacctcagtcgagttgcctctgtggactgcgagcaagttcggatagatcaagctgctggaccgaatctgggatagtagccagatttttgaggataatgagcccaaaatgccagaaaatctatggacacttcgcaaatacatccgagcggacaatcagtaccggcaattccagttccgactgagtatgggggaggcagtgtcccgcaaagatctggaaatggtcaagtggctgtcgtccaagtttcccgagtgtaagattccgtcggaactggtggttgaagcttgtgaacagggggcgatggagattcttcagtttttctacgacaacgatcgtgaggttttggagagcaaggggttgcatggagtgggtcacggtgttgaatggggaggtgaatccatggcggctgcgatctcggctcaccattgcttggtggttgcaccgccacattccagacgcagagttcgatatgaaggcggcagtggagtcggctctggaagcgggggagatgatggctgtccactggctggcgtggaatggtgcggagtttccgagtctaatgaagaggggaagctcgagggagctgtgaatctgctggagactgcagcggagaatggacaccttgacattgttcgctggctgattgagaatgatgaagccggcgagctgacggagcttggtggagaggggagagtctcgatcctccctgcagctatcaacgggcacgctgaggtggccaagttcctccgtgataaagttcagcgaccgacctcatctttggatcgtgaacaggaacttgagctccagctaggcacgcacgaagcgttggacgagcagttcatgttggtgtgtcggggaagacaatgacggaggccgcgaagaatgggcattttgctgtcgcgcagtggctttatgacgagtacggagatgacccattcgtcgacgtgttcgactacggcgacaagttctatgacagacagacatccgtcgacacagtggcgatggacgcagctgcaaacaacgggcacctcgacgttctcaagtatctgcacgagatcgaaacgctggtctatggcaagcgcaagagcgaagagacgacgaagcgatctccgccacgtgcactgaaggagcgatggatggagctgctgcgaacggacacctggatgttagtccgatggctgtctgagaaccgaagtgaggggtgcacgagtgccgctatggacggcgctgcagggaatggtcacctcgaggtggtgcagtggcttcactcaaatacgcaggctggttgtacgacaatcgcaatggatagcgcggcccagaatgggcacctgaaagtcgtgaaatggctgcatgagcatcgatctgaggggtgtacggggcacgcgatggataaaacagcggagaagggatttctggaggttgtcaaggaggaaaggtgaaatctacagacagaagtaggcaaactacagaccgtcggacaaaatacagaaggggtaggttgccttgccgatttgccatccctgtctacactgaatttagcttaatatcggtatttgcaggctcaatatggttggtgtaatgcctgctgtttccttcttaccgtgttaccgtaactcggtaaggcggccgtgttaccataacacggtaaagcggccgtgttatcataactcggtaaggcgaccgtgttaccataacacggtaaagcttttgctatgcgtctcaatacctcggaagctaaaccagctaccttacagagtctgcagacagacgagcggcgctgagaaccctgctagccactgccaacacaaacgcagagtaggaccgcgtatgcatgttgcagtctcgaattggttgctggggtaccctctgataataagctttgaaacttcgagaagtcgaccttcggcgttggaaaggacgagtgtgcgactgctaggaaattcaaattgcccaactggggattccctcaggaattatccttccgtcacgtccgtccattgggcctacaaaggccttggccccagcgcggcctccctgatgcacacggggtccagatattaattaacctactgagcgtacgacccagctaagatatgcgagaatctattactgtgtgcccccagtgctaatagcgccgcgcatgggcttcatcatttcctacatgctcaattaggtgtagaccggatacctacaacatcgtgtgtgagcccagcggcggcacctcggacgattcagctcaacgttcaactacggttggttgccctgaactattcacgactgtttcacgtcacttgtaggcagcgatcgtgctttttgatcgatagatactatgcgaataggcagtgccgtcgggcacgaccgcgaacctgctgaagctgtccaccgaaacgatccagccctgcatctcgcactgcttatagtttgtatctactggtatcgttgacgctaaaagccttaagcagcagctcaagcacgttggtgctggctgacgagcttactgaaccaggaggtgttttccacaatgtcctgcgtgccgaccacactcaacctcacagtcataataacgatagatagtagatgctgctggggactagtgagttctgctcttccccggcgagccgaggttcagcgcttaagattgtgtagtgcccactctgtgtccatggatatcgcgaagacaacccgcgaaaacgtgacggataataaacaatttaccagtgttatgacctcgactaaggccattacaacgaagcccaatgtccaacagatacctaactccagggccgtcaactcgaagcagaccaaggcccagtttaaccccggcctaagcacaaagctaagcgaagaaggcggaggccaaaatgactaagatgtttcttatcgccacgcagcctaaaaacacacaaaagagataagttgtcgctgccagcgattcgagttcattaaaccaaccactatctcatgaatcttccatgctagctaccacggactctttcgccctgtgttcttacacgtctccgaagtattcactagcacaaagatgtcgaggtttagctggcgaacctgaggctggcttttatacattaccctgcagctctgcccagccacgaacgtatgtcgggctgctcgttggtgtggctgacgagcgcaaagttccgccagtaagtgaatgtgcgcatccgtcaaagacaaacttgggatagccgtattgtgaagcattagccggtgatattgggaatattgtgggtctaaaccaagcaaaagtcgtcaagttggcacgtctgtatttagtggtgcagttctgtattcctgcacgacctctctgtaggactggtagtgtcttctgtaggttgtcgctaccctctgtagatttgcaccacgctctgtatttttggagcaccttcagtagaaacggtatgtttatctgtagtttccacccgctctcgttgtcaagtggctgcatgccaatcgaaaggaaggctgcacgaaacaaatggctgatatagcagcatgcaatgggcaattgcgcgtgttgcggtggcttcgctcgcaggggttggagggctttccaattacttgcattgacagtgcagttttgcactcgcagtgccacgtggaattgacagagcactcggtcattccggtggacatcgcccgaggttattgactggatcagcgaaaaatactcacatttccgcgtaggggatcaagcgtagtcggcgcgcagggagatctcaaagtctgaagatgcagaggcacaggcacaaatttttttcttcgttatgaagaacaatgacaaactgcaactgaactgcactcaccacgaatcccatgtaaaatacattcgctagaagctgaagatagacaaggcatcaggtaacgtttccgaagacgtcttgtatggttttcactcaacacactggacgagtaacatctatttaacttaagacactgaagacattgatatacgatacacatgaccaccgctctacccatcgagcgatggcacggacgagtcgatgaatgtacacacggaggaggaggccgtgaaggcgtcgaagccgttcgctcggtccgaagccggctccgtcgcgtccatgttggtcccggcgctcacacaaatcccgcagaagacgatcttccgctgcagcagtcgcccacacgacgagttgaagctcaggcgctggctgatcttgcacgaatagcacacagacccgctgcacaacttgcacgtgttccccgcaatgctccccatgacactgcgggtgcttttccggcagacgacgcacttcctgctgtgtcgctccatcccagacaacaagaaagcaccgcgacgatgcttcagcatccacgcgagcttcttcatctggccgcagtacgcgtagttggtcgccgccagcagaaagttcgccactaccgaggacaacagtgcgcgaatggtgtcgcgaccaggatcgaccgtggcacagcagaaagtgtcgatagtgttgcgactgatttgtcggaagcacgagaagaccgacaagttgcctcggattttgttgggcagcgcctctgtctgaggaaagtcgatggagtgttggaagcggtagcccacccgaacaccgttgggtaggttgataattccagtcgcttcgatgtagacaaagtctcgacttctgacgaggttggaggcctgaagcggggagtcgatcgccatccacttgataactagcgagcggaacgggtcgtccttgctcggttccacgacggtggccagcaccgcgccgtcgttgatgtgctgcacgtacgaagcgttgatgcgcatgtcgtccagcgtcgaactcatgacgccaaacatgaggtcttcaagctctccagagactgcccccacgccgagaagcaccgacagatccttctcatccgtgactacgttcaagcgctgagtgcagctcagtgagttgtcgagggttgtgcctctgcgaccgagagctcttcgagagcgttcaccgtacacgtgcaaattgtcgcgggacttgacatgctgccaccgtcgtttgttcaccctgcgccggtcgattagaacgtagtccttgtatttctgcacgtattcctccacatagtcttcggtcagatcgatcagctctcgccgctctgcctcagtcacgttcaagtccgggaacggactgccgatgaatcgctccttcgtcatcatggttgctgtttggctggtgcggtgcaggttctcgactgactcaagcgacagcttgaaccttccttgactggcagtcctcctccagatgtgtgtggattcacctgaagcgtgccatgcgctgttgtttacaacatcatagttgaatggtcgaaagctgcgggtcagaagctcgcgatcattggggcttagagataagatccgttttagctcgtcggccatcgaaatagacacctgccacgaggacatgttgacatacagatgggggcatcgtgtaagagagtaatgccctgtgccttgataacaccttatccccttgccatatggagtttttgaccataatccctagaaatgggcaaattcacgcggatgtccgtctacaggatagagccaacacgagctcacagaagataaaacatgtgtgggctttaatggtcgtggtattagcttacaacagtcaaggcacctgaccgtttttgacgccacagatcttcatgcattgaacgccatcaatagtgcaagtagcatatacgggtaagcacagccaacgtgactgtaaagtccatgcccgcgtgtctcccgttcaagttacacgcgggcatggactttacagtcacgttggctgtgctatatgaagtcagcgctggtcatgggctcacttcgatccccatagtaaacgcgactctaagcgctgcgaagagtcgcgtagccggtttcaacggctggagatatgccgctgcagacaggatgaacagcttgagcagaagcacacgatcgagagctcgaaggggatggagctcaagcaggagcccaagcaggagcaggagatgaagcgtttggaaaaggagtaggatctgatgcagtgctagatcgacaggagtccgaatgcgagctcgcagcagtacatgtcggaaggttcacttgcgctgcgaggagaagaatgtgaagtgagtttattttgcttttgcgcgctagctactgctatctcttctctcctgtgcctccctcttgtagttcggttgtctagctagcgtgtcgtagttctaagccttgtggtgtcgtttgtgcgaagtatccaaagcacagatgcagcgttgtgaggcgctcacagcgcgatgcggcgttgtcgctcagttgagccagcggtaacggctccttccaacagtacaagcaagtagaagctcaagcctgagcagattgttggagctttattagaataggagcgcgagcgtgagcgcgaaagcacttcaggtttcggcttcggcttcggctctacagctgcaagcgcaggggggctggagcaggagcaggatggtctcgaaaaggagcgcaagacaacattaatatgtatatattaaaatcaaactcacaataacaagattcgcacagccattgcgcttgcggttcgtagcagtactcggccggaggttgcatggattgcgttgttacacccacggatggcaggcagggacgttctacagacccaagcgacagatcacctgcttcaggctgcctcggcaatggccgctgggctctatcctcacccgggtcgtacacaatggagattagtcggtaaaggcaagagctcgattgtgcgagggtgtcttcggaaaacgagctccgagacgaaaacgaaacaagcacgtcaaggagcactcgcggtggcttattgcctgggcacacaccgagatacgccaatacttacgagctaccagcgagttaatgtacaattttgttgaggggcgagacgatgtcgaagatgatctgttgccgtggtggaagcgcaaatcgacgcgtttcccccttctggctcagctcgccagtaagtgcctttgctgcgtgacaactttagttccctcttgcgcgctttaccctaaataacaattcgttcaaccacgacaactaggcgggtagatagatatcaatgaaacacatcacactatcctaatggtgtttgagtttggatatatccatgtaaatcatcgacatcacccagcacacttacacaagcacaccaacgagatccctctcgcaaccctcttccaacccacccatcgttaccacgcccacgtcctccatttagtccggttggtaaacgcttaataaaagcccagctttaccctccgactaccatttcattcaactcaagagggtggtccaaaatccatgcgtttatctcccggagacggttctccaaggaccagctggcatcttcgtccgggtgaagctgcatatgaaggaacaggaaaacgtcgagctggttggatacgacagcactaacgacttctggaaacgtaaagtcatttgcgagatgcttgcgtagccatttcataacatgtaaatggccactttgtgctgcctttctcatcgcttgagccgtgcagacttccggtctgttcgcatgccacgtctagcggcggcatccattgcagtcgttgtgccaccctgcgagcgatgctcatgcagccatttgacaacttcgaggtggccattgcccgctgcaccatccattgcagccttggagctgctaacatgagtattggaatgtagccattttaccacgtcaaggtgcccgttgcgtgctgcgcggtccatagcagccactgtacatctccgaccggtgttcgtgaagccactgcgccacttgtaggtgccccttagcagcggcaacatccatcgcatctgttgtgcacccttcttcacgattgtgatgaagccactggaccacgtgaagatggccattgctggccgcgccgtccattgccttcgtcgtgcacaatggtccagatttcttggttttagtgcctctttttcgctttttggtgcccgcttcgattgacatctgcaactcgtgcaagtacttcacaatgtcgagatgcccatcgaccgcagctgcgtccatcgcagtactagttgtgagcgacatgtcaatatctcttacgaacaaattcaggttgggttcgccgccgtactcggcgtataactacttcaccagatgccctttcaatgcggctttgaccatcgtgtcccccgacacgtatgcggtatcaacccgtggttggattatccgtgtaggtaatcttggcgaagatagttggcgttcgactgggtgtacccacgaagatactttgccacttcgaagtgccctttgacagcggcaagatggatcccaaggtggacttcgcagctgaaagatgcagcacgcgactcagatacttgaccgcattcaatcagccacctcacagcgtcaagacgtccgttctccgcggctttcgcaaccaaccccgcgaccccatccagctgcactcgttccgccagccattgcagtacgtccacgcgtccctgagccgcaatatcacgtacgggagcgtgttgtgccctgtttccaagccttgcaaaacctcgcgaaatcagccactcggccacaagaatacctcccatcttcaacgccgaccaaagcgccgcgttcctatcgaagtctgcatctggaaaacgccgttgcagccaccacacaatgtcactacgtcgaccctggaccgccgccgacatggtgagatctccccactccacgtgatgtccgacctcagtaacccctttctgctccaatactcgagtgtcattctcgtaaatgagctgcgaaatctccagtgacccagccaaacaagctgcagccaccagctctgacgtcactctgagacctaggaacgtggtcaaaaccacttgagcagctccaaattctttcgaggcacagcgtcctccaacccaatcgagaatagatattgctggtagtgtcgatctgtgcggaggaacttgcgtagccaagtctcttccgtcagtttgctgtcggaatttaggaattggtcgctgctgttccagatgcgatctagaagcgtcacaaagcccaatttgcacgcttcgagcggggtgaagctcgctgaattgtccagggactgggagactgcctcagcgacgtgagggagacccaggaacgcggaagacgagtgtggcgagaatgcgctatgtggtgcacacggagtcgaagctctgaaaacttcaagcagatgtacccatgttgaacatggctacatgcttggtttgatatggcttacactgaaccatgtagcttatcatacattcttcaagatacctgtaaacaagccgacatggcgtgcgctgttccgcccctgctggcagtgaggctcgtgttcggcgccaagacggagctcgtggacgtgcctcacctcatagagagcatgtctgggttgctggacacttcggttgacgtccctccgctccgggcgtgtaaactcggttccgtaaagttactggatcgcatctggaacagcagcgacgtttacgctcaagacagcaccgctgtaacaagcgaaactttcaccctccgcaagttcctgcgtgcggaccgtcactaccagcaatatttcttcacttcgaccttgaaagaggccgctccaagtaaaaatttgggggtggtcaagtggatttcgagcaagttcccaacatttcaagtttcctcggaaatcgtggccagggcgtgtctagctggagctttggacattctgcagttctttcatgacaattgcactcaagtgttggagaaaagggagaaatttggggtggggcatccagttgactggggaaatttaaccatgtcggcagcgattttgggtcgtcgaagtgacattgtgtggtggctgcatcgccactttccagacgccaactacaatttggagattgcattggagtcggcactaaaagtggggaatgtcttgatagcaaaatggctgctgaaccaaggggcagaatggcgccgacgccggcgtaaccctactgagcgtattgatgcctgctacgttgctgggcaagagcgactggacgtactgcactggctggacgaacggggacaaattgatagcggggacgtgcgaatgttggtaaatgctgccaaaggaggacacttggaagttgtacgctggttgatcgagcatcgtggttcgagtactgcagctgtagcagatgcaatgctcgcgactcacgccgctgcaagcaaatggcccctgaaagttgcgaagttcttgcgagagttcacgaaagaagcggagggctcgccgacaagtgaactgctcgacagtatcgagtacaggcgagagttgggcaggatcgatgtttatacggtgtcaggggaaacatgcgaatggctgcgaggagggggcgcctcggcgttgctcgatggctgctcgaagagtatggggacagtgtcgattttttcgtggatgataaggggcacccaatcagtgtttaacgaggctgccggcagtggaaacctcgagttggtaaagtacttgtacggtcttcgcggtcgtggccactgccgtgtccccttccagcaatggatagtgcagcccgcaagggacatttgcaggttgtacaatggcatcaccaacacggagctgagggctgcaccacctttgccatcgacatggccgcggcgggtggtcaatacacgagcactgttcactgggctgtacagtagcggctatacaatctggacatctcgatgttgtgcgctggttacactacagcatgcgagctgagtgtagcaaagcagctatggattgtgcggcgaagaatgggcaccttgacatcgtaaaatggctacactcgtatcgaaccgaaggatgctctgccggtgcgatggacttggctgctgcatttggtgctttagacgtcgtgaattggctccatgcgaatattgtacatctagagcgatgcaacggtctgcaagataccgacacctcaacgtcattaagtggctccatgccaaccgctgcaccgattcagccgccggttatgccatggatagcaactcctttgaggtgttgttatttctacactatgaatgccatctaacgtggcctgaagaaggagataattctctttcccttaacgatttcaggtggatcgacgaagccttttcgtgacttggcgttaatgtatattttggacattttagttttctttttatactttcaaatattttacgtcaaattcaaaaagtcttcttaacctcttggatcatgcggattctttttttttgtttatgtggagcgcacagatagccccgtaggtaaagtatcagcaattaacttctaaaacaaaactttatttgatacttttgagaagatctatctatctatcagaaacgctgccgattgacgttctgttataggatccttctctcgttcatgattgttaaaacaccaagggaatggcttcggacggagaaagatccgagagaagagggatatcttcatcctcatcactgtcctccataatagcctgcaattcgtcgtccaagaacgacgaattctctgaaatgtccgtttgggatgacgtcgttgacgatacgctcttgaaccgcgtgtaaacattgtagccagtagcctgctctttcgcggccagctccgcactcagctcggtagcgttggtaatgcacgaggcacagaacgagaccttgcgcttgtcaagcttcccatccagctctatgaagctgaggcgcttccgaatcttgcaggagcggcacaccggaccatggcacagtttacacgtactcgatccaaccagttgcttgcccgatatcggacagagcagactcttttcgcacatactgcagtgggcactctgcatgtggctcttccgtttgtttgccacgttattctgctgcaacatccacgccagcttcttcatttgtccgcactggacgcacttagcaaccgagagcatcgtttccactgccgtcgaggaccacataaagcgcttgatttcacctcccgggtcgatcgtgccgcgagcgtagtgctcgataacgttgtcgtcgacttgacggaagaagccgaagatggacagattcccacggatcgtattcggcagcggcttggtctccgggaactcgatcgagtgcagcagatagtagcccacacgctcgccgttcgcaaggtaaacgaacccagtggcctcgatgtagacgaaatctcgcctcttgacaagactcatagcctgtagcgggagatcaatggtcatccacttgataatgagcgactggaagggcatttcctcgctgggttcaaccacggggcacagaatcgctgcgctgtcgacgtcacccacgtacgaagccttgacgcgcatgctgtcttgcgtggggttcacggcgccgaacatgaggtcgtctaagccaccattgaacgtcccgacgctcagaacggagggcagagccttcccctgcggcttctcatcgttcactccgacggttttccacggctcaaagttggcgtctcgattgcgagcggcgtacacgtgctggttgtctcgagacttggcgagtttccagcgtcgctcgtccacaatctgctggtcgatctcgacaaactcctcgtactcctggaagttgtcgtcgacgaatccactgacgaggtcgatcagcacgcggcggtcgttttccgatacctgcacgttcgggtacgggttgtcggagaacctgtccttccccatggtgagcgagctttgccgataatctggaagtgataccgcccgagcgatccggacaaacgtcgggtgcacagcgtattactgcggagacttccttgcagctttgatggtggcgattacagaaccgtgattgccagaccgagtgtctgttgagcaggcacgggctttgcttggccacaatccctctcctccgcatagagaagcgtatgtttcctaggaaaataattctccgatttgagtcgaccccggtgagccggaacctcccactccaccgtggagtccacgagcttcaatgcggaggaattgcagcgaaattgaaccagatggatcgacggcaacgccagccacgatacacacacgcaaaaatgttaatcttctcgcataaactcaaggattcccctgcatatttccagtgataatcaacatcaaataatttagtgtacatcacaccacgctcactcaaaatcagtatgctatacaaaatccacgtcatcttttattcgaaaagatgacgccgaatccagttccgccgctgctggcggcggcgctcgtgctccgctccagagccgagttccagagcctccctcacgtcgttgacgctatgtcccaatttctcgacacttcagcgacctcttcaccgctcgaagcggccaaattgggctctggcaagcttctgggccgcatttggtacagcagcgaccagttcgtgaattccgggactgaaccgacggaggagacttggctacgcaagttcctccgcaccgataagcactaccagcaatatgtctttctgtttgggttggagaaggccgttaattctgaaaatgtggagctggtcaagtggtttttgagcaagtttcagggtctcacggtctcgtcggagttggtggcccgagcttgtctggttgggtccttggagatcttgcagctctttacgccaatgacaaccggacgctggagcagaagggggtttacggactggggaacaacgtcaagtggggaggtgtgaccatggcggcggcggtccagagtcgacgcagtgatattgtgtggtggctacatcgaaacattccagacgcagactacaacctcaacgctgcactgtagcgctgacaatgggggatattctgatcgctgagtggctgatctcgcagagggctgcgtggcctgagcgtgacgaacatggagatggaggtatcgctgacgagattgtggctcggggacgcgtggacttcctgcaatggctggaagagaggggaaagctggataaagttcccgggtggattgtcaaggctgcggagaatggacaccttggcatggtgcgctggctaattgagcgcagtcctcctaacggaggcagccaggctaggacggctctgttaaagtgcgaggctcagctggcgattcacggtgccgccgccaatggacatcttgaagcggcaaagtatcttcgagagtatacaaagccgtacaccagccatcttctcgtggatcagcaacagactcctgggctgcaggaattgcaagcgcagctcagagacgagcttgacgtagaaaacgtgtctgatagcacgatgaggacggccgctttgaacgggtacctgaatgtggtcaagtggctgtacgcggagtacggcgtggacatcttcgtgaaaaatgtgagctggacaccgtcgagtcccaatagtaccgccatgaacgcagccgcgccccacggacatctcgagattgttaagtatctgcataagctgcagatatcgcttagtgcgaacgccggggagctaggaaggggagcgtctacaaaaaaaatctggaccaaaatgcaccgagatggcaatgactggagcagctatcaacggccatctgaacgtgattcagtggcttcatcacaaccggaaagaagattactcctctcaagccatggactttgccgccgctaaggggcacctactcgtggtgcagtggcttcatgaacatcgtgcggtaaggtgttcaacgttcgctatggacgatgcggcacggaatggacacctcgacgtggtaaaatggctacaggcaaatacccaagctggttgcacgaaggaggcaatggacggcgcagcgggcaatggccacctcgaagttgtcaaatggctgcatgagcatcgctctgaggggtgtacgacttccgcgatggatgatgcggctgagaatggagctctcgatgtcgtgaaatggcttcatgtgaacagggcggaaggttgcacaagtcaagcgatcaaaaaggcagcagaaggcggccattttcgtgttgccaggtggctatacaagcaccggccagagatttgtactccatccaagaactttgaggttttcctattcctccgaatgcagcttcatcaagcacgtacggagggtgctgcaagctggtccttagaggacgatcgctaggggcatttacttttggatgtataaagcaccggcatgagtttcaagacgtggatgtctaggacttcatgcacatgtaaaacgttaaatttcggctgcggatcagagatagtctttctaccagattctacgtatgagtatgttggggttgccaactacatagtattaaagtttcttgcataattgaagttgttcgtatgaaagatcacctcggaggacattgtgattgcaagctcaaaaagctatgatactttactttcagagcgatcgatactgctcaggatcagtgttcaacgttgttacaatgtgtacaagagcgtattgtcaaggacgtcgtcccaaacggacattccgagaatgcgtcgttctttgacgaggaattgcagacaattttggaggaaggagattgaagtggagatatccctcttctctcggactttttccaatcccttggtgtttaacagtcatgaacgataaagatggattccttacagaatgcttccaagtgtttccttattttttatacggtgaaatgtgtggcttatcgtacggcaactaacaacaaaataacctttgatcccgccaagtcacaaaagactggttggtgttcaacgatccaggcattatttcacgatacttagccatcaaggaaagggagctcactacggtgtagaaacaacaaaacctcaaagaagttgttttccgcggcataacgggcggctaaaccggagcagccctctgaccggttggcatgaagccacttaatgacgttgaagtgcccgcatcttgcagccatgtccatcgctttcgacgtgcagccctcacgccgattcgcgtgaagccatttcacgacatttagtgcgccaagcccagctgcgaagctcatcgcgcctgcagtgcatccttcggttcgatgcgcgtgtagccatttcacgatgtcgaggtgcccattcatcgcggcagcattcatagcggctgtgctacactccgcttgcatattgtagtgtagccagcgcacaacatcgaggtgcccatatcgtgccgcgttttccatagctgcagctgtacatccgggcgagcaatgctcatggagccattgtatcacattcaaatggccacacgccgccgcctcgtcgatggcaaaagtggtacagccctccgttcggtgttgatgaaacgattgtatagctccaaggtgcccatgccgggctgcatcatccgtagccaagatacccgttgacttcgatctgaaaactgtttcttcttctcgcttccgcttcctcaaggttgagccatcgcaccctcgaagaccgtgcaagtactttaccaactcgaggtttccactgccggcagcctcgttaaacactgattgggtgccccttatcatccacgaaaaaatcgacactgtccccatactcttcgagcagccatcgagcaacgccgaggcgccccctcctcgcagccattcgcatgtttcccctgacaccgtataaacatcgatcctgcccaactctcgcctgtactcgatactgtcgagcagttcacttgtcggcgagccctccgcttctttcgtgaactctcgcaagaacttcgcaactttcaggggccatttgcttgcagcggcgtgagtcgcgagcattgcatctgctacagctgcagtactcgaaccacgatgctcgatcaaccagcgtacaacttccaagtgtcctcctttggcagcatttaccaacattcgcacgtccccgctatcaatttgtccccgttcgtccagccagtgcagtacgtccagtcgctcttgcccagcaacgtagcaggcatcaatacgctcagtagggttacgccggcgtcggcgccattctgccccttggttcagcagccattttgctatcaagacattccccacttttagtgccgactccaatgcaatctccaaattgtagttggcgtctggaaagtggcgatgcagccaccacacaatgtcacttcgacgacccaaaatcgctgccgacatggttaaatttccccagtcaactggatgccccaccccaaatttctcccttttctccaacacttgagtgcaattgtcatgaaagaactgcagaatgtccaaagctccagctagacacgccctggccacgatttccgaggaaacttgaaatgttgggaacttgctcgaaatccacttgaccacccccaaatttttacttggagcggcctctttcaaggtcgaagtgaagaaatattgctggtagtgacggtccgcacgcaggaacttgcggagggtgaaagtttcgcttgttacagcggtgctgtcttgagcgtaaacgtcgctgctgttccagatgcgatccagtaactttacggaaccgagtttacacgcccggagcggagggacgtcaaccgaagtgtccagcaacccagacatgctctctatgaggtgaggcacgtccacgagctccgtcttggcgccgaacacgagcctcactgccagcaggggcggaacagcgcacgccatgtcggcttgtttacaggtatcttgaagaatgtatgataagctacatggttcagtgtaagccatatcaaaccaagcatgtagccatgttcaacatgggtacatctgcttgaagttttcagagcttcgactccgtgtgcaccacatagcgcattctcgccacactcgtcttccgcgttcctgggtctccctcacgtcgctgaggcagtctcccagtccctggacaattcagcgagcttcaccccgctcgaagcgtgcaaattgggctttgtgacgcttctagatcgcatctggaacagcagcgaccaattcctaaattccgacagcaaactgacggaagagacttggctacgcaagttcctccgcacagatcgacactaccagcaatatctattctcgattgggttggaggacgctgtgcctcgaaagaatttggagctgctcaagtggttttgaccacgttcctaggtctcagagtgacgtcagagctggtggctgcagcttgtttggctgggtcactggagatttcgcagctcatttacgagaatgacactcgagtattggagcagaaaggggttactgaggtcggacatcacgtggagtggggagatctcaccatgtcggcggcggtccagggtcgacgtagtgacattgtgtggtggctgcaacggcgttttccagatgcagacttcgataggaacgcggcgctttggtcggcgttgaagatgggaggtattcttgtggccgagtggctgatttcgcgaggttttgcaaggcttggaaacagggcacaacacgctcccgtacgtgatattgcggctcagggacgcgtggacgtactgcaatggctggcggaacgagtgcagctggatggggtcgcggggttggttgcgaaagccgcggagaacggacgtcttgacgctgtgaggtggctgattgaatgcggtcaagtatctgagtcgcgtgctgcatctttcagctgcgaagtccaccttgggatccatcttgccgctgtcaaagggcacttcgaagtggcaaagtatcttcgtgggtacacccagtcgaacgccaactatcttcgccaagattacctacacggataatccaaccacgggttgataccgcatacgtgtcgggggacacgatggtcaaagccgcattgaaagggcatctggtgaagtagttatacgccgagtacggcggcgaacccaacctgaatttgttcgtaagagatattgacatgtcgctcacaactagtactgcgatggacgcagctgcggtcgatgggcatctcgacattgtgaagtacttgcacgagttgcagatgtcaatcgaagcgggcaccaaaaagcgaaaaagaggcactaaaaccaagaaatctggaccattgtgcacgacgaaggcaatggacggcgcggccagcaatggccatcttcacgtggtccagtggcttcatcacaatcgtgaagaagggtgcacaacagatgcgatggatgttgccgctgctaaggggcacctacaagtggcgcagtggcttcacgaacaccggtcggagatgtacagtggctgctatggaccgcgcagcacgcaacgggcaccttgacgtggtaaaatggctacattccaatactcatgttagcagctccaaggctgcaatggatggtgcagcgggcaatggccacctcgaagttgtcaaatggctgcatgagcatcgctcgcagggtggcacaacgactgcaatggatgccgccgctagacgtggcatgcgaacagaccggaagtctgcacggctcaagcgatgagaaaggcagcacaaagtggccatttacatgttatgaaatggctacgcaagcatctcgcaaatgactttacgtttccagaagtcgttagtgctgtcgtatccaaccagctcgacgttttcctgttccttcatatgcagcttcacccggacgaagatgccagctggtccttggagaaccgtctccgggagataaacgcatggattttggaccaccctcttgagttgaatgaaatggtagtcggagggtaaagctgggcttttattaagcgtttaccaaccggactaaatggaggacgtgggcgtggtaacgatgggtgggttggaagagggttgcgagagggatctcgttggtgtgcttgtgtaagtgtgctgggtgatgtcgatgatttacatggatatatccaaactcaaacaccattaggatagtgtgatgtgtttcattgatatctatctacccgcctagttgtcgtggttgaacgaattgttatttagggtaaagcgcgcaagagggaactaaagttgtcacgcagcaaaggcacttactggcgagctgagccagaagggggaaacgcgtcgatttgcgcttccaccacggcaacagatcatcttcgacatcgtctcgcccctcaacaaaattgtacattaactcgctggtagctcgtaagtattggcgtatctcggtgtgtgcccaggcaataagccaccgcgagtgctccttgacgtgcttgtttcgttttcgtctcggagctcgttatccgaagacaccctcgcgcaatcgagctcttgcctttaccgactgtatccattggtgtgcggctcgggagaggatagagctcggcagccatttcgttagcagcctgaagcaggcgatcgcttggttgggaccgtagaacgtccctgcccaccaaccgcgggttcaacaacgcaattcacgcaacctccggccgagtactgctgcgagccgcgagctcaatgtctttgcggattttcttacgactcggcaactcgacccccactcgccctgaaacttgcgtcaggtagtgtaccaatcccgtatcttccactgtgcaaacacatcttgaactccctgtgatctagagcgccagcaactcattgacttccggtcctcgctctgctctaataacctttgcagcagattgggttctgttgcaagtgcgaaccacgagacaacgcaactccgtcgcgactgggtttggcagcaacttgttcttgttgagccttcgtcagctattgttcgtggtacgttttccatgtgtctcttggctgcggtcgtgtttcagtcttgtgacctatttcctccttgcacaccaggcagtacgcgcacctcgcgtggtccgactgaagttcttgcgttcggatatcagcacagcagtccttgcgaaccagtcggatgaagcgccacagttccctgcgatgttgcttcttcatcttaaacctgcttggcggggtgggaggcggtaactcggtatcacgaggctcgtaggagagggaaccccagttgccgcagcgaacggatctgctcctgagagccgactgcgcattttcaccgattgtgggacggtggctccataaaaacggagtggtgctcatacgtatcggttaatactgttttcccagtataaattaaagatgtcgttgaagtaccgtatagtatctttggaagtttaaaaggtataacgcgttgatcaggtacatgccgattttgtaaaatcccggcaagaagaccgattcgccagcgatatttttcatagctaccgagacaaacatctacttcaatctttgaataattgcttccaaattgcagtatcaccagatccacatcagggtatatatatatatcttatatgcttgaagctgctggttatgatcttaaaaatacttcagtaaatgattatcgacagcaggcgaaattctgaaggtactatttaagtgtttatgggcatttttacccatggcttctgataaaaaaatagctgatggaaagctcaacactcaaaccgccgagttggtgtggtcctgtactaattcagcatgggctactgaactacatgtacatcagctgacaatagaatcccgtgacaaaaaaacgaattgagcaatatacgaagtacaaaggtatactgctgcggcgtaaaagatcacactctcacactcacagtttactactggcgcgaagactactcatgacaccacttatattctaattctgcatcgaaaatacagctttaatttaaaaaatattcctccattggagtgtcggaagaggtcacagctggtccttcaaattcaattaccaaggtcccccatcctctgtttagcaaccgaccctagccaatatccttatcgcagagagaagaaacccgaaataatccaaagttcttcaatgcaatgacaagtccgtgcaagatagctcggggctgcgcgcaacaaaacatgatcatggtgattgataaatttattgaatttatttggagagcggggacgtcggcctgtagtagaggctccactgcagggcgtcgacccctaagcaactcaacggaggaacgcgactgggatgctccattactatgaagtattattgctagtgtcttttttttcaacccttgtaaccaacaactcaaggtcacgctattagttgaacaggaatcgactactaagtagatcctaaacaaccacagcacgaaagatatacatattgtgctcattgaaagggttaagaaagttgaagaggatgatcgacgctagttggaggtcgtttagagttgtaactacgcagctgcatgcatatctgcccttcggtcaggaattaaaagtcagacctagcactactgatgctgatttcgtccgacgactcggacgacagcaaggccgaatacgacctgtacgtcttgccactggccatcaactgcgatcgggcgacgtccacggagctcatacttgtggcctcatggatgcatgcagtacagaacgtcaccttgcgcttcaagagggtcagatctgggtccacgaaactcaatttgcggacgatcttgcacgcgtggcatacgaacccaaagcacagcttgcacgtgctgttgctcttaccgaaatcgccgagtcgccgggtcgttatcgaagccgaacacgtcacgcagacattcttgtgattcggagtgccgttctgcttgaactcggcgtacttcttgtccagcatgtagtggagcttcttcatcttagcacagtagacatacttcaacgtgcagaagtagactccggccatgctgggcactgcaagcttcttgatcatttcaccaccagggtccatcacgactgtaccgtaaagctccatagtgttgggctcaacctggcgccagaacgcaattgcggatatgttgccacgcacgcggttgggcagatcgggtgtcttcgggaagttcacggagtgcatgaggtgatacgccaaacgctcgctatctctccagcggatgaagcccgtggcgtcgatgtacacgtagtcgcggttcttcacgagtttcgtcgaggcaaatgggatgtcggcctccatccacttgatggtcagagcctggagcggctcttctagtgtgggctcgataatgctgtcgagcactgcggctccactgaagtcgtcgacgtatgaggccttgacgcgcatagcttcgagtgtggggctcaagagcccgaacatgaggtcgtccagcttgccttccttgttgccaaggccccagatcagaggcagcccgttgcccgtgatgttctcgcctacggacgcggttccttgacgctcgacgtacatcttgatgccttggcgctgcttgcagagcttccagcgacgcggatctacgcccttcttcttctcgtcctggtacgtcgtgtacttctcgaggttggccaggatgaggttgttcgcgacctccttgagctgcgcgtggtcgtgctcggtcaaagagagctccgtgaacgggttcatgatgaatcgttccttcaccatggctgccacaagtgccacgctcgcaacgaaaggtcgattgagaactaattaatggacaccgctggactctcgcgaacccgttgtacgagtcgtaatacttacgacacctttacgtcaacgccacaacagcaccaccaatgcgcctttagcagagcagctggttttcggggcggaggggaattcaatacttagtatacagtataccagtacagtgtagcctccgtttgctacacctcttattaatataaactgctatattcacagggtagctacttctttgttcaagacaggacacatcaagatgctgcagcaaacccgataagtctataggagtttgtatgggccgcactccgcgaaaacgggtacttttgcctcggctttccaaggtcgaaaacgggcgcaaactttgacactataatgcgtagcacgtaagccagcaccacagagatccgcttgtgaatggggtccactcactcaaaaaatgtttgcaaaggcgctatctgttcaatccgctggatcaatccgctgcctgcccgaatttgggcggatgaaatccgctggaatatgctcgaatttccgctggaattgcattcagtacgcgccagcggatcggccattccgctggaattttgttgtgcagtacgcaccctcactacagcgcatctcctgcgcctgctttgcagccgcagcatctgcaaagttgacttgaaacttagcaaaatgtcagtttcctggagcattatcgtctacgaccaacttctgcacacggaacaatatgctgtcggctactattcacttcaccctctattgcttcttgttgattcaatttttcgattcaaggaatgagcattttttaatgaaaaaaataacgcaaccactagctcatgcagagttggttttcctacatgtacctattgggattggtcccgtgagtcgcttgccgcgacccaccagcttttacacagagcggcatagctgtgatgggagcgaaggtgggtcttgccaaatgggcagacggtgtcggtgtgcttggcgagcgcagtcggcacggcacggcacggcgcagctcagaccgaaagtgatgatcgtggacgtttctcgggggaaagacgtgtgcagcggcggacgcttgccgtcgtcgacgccccgcctaacgactacatggtcaacctattgctcagctctcattcatgcgtaacggcaactgacttgcgccgaatgatgcaccgtacctcacacaaagattactttgggtgtagcactcttgttaccatttgctagaaaggcaaatatgcattcttcatgttaaaatgtagcttcgtaatttcaaaggctggaaaatgatctactcaaggctcagctttctgaatcaagaggagggaattgtaaacctcgttggcttgcagttggcccatgtgctcttggacaatctcgttattagactgcgggcctgcccgaggcggccaaacagttactctatcttctataccgaggcctgttgctctaatattcggtaggcaaagctcaacgcttcaattttatgttaacgagcgattggaaaatgttttctttgcgttaagtaaaagcaatgaaacgaaacctaatgctcgaaaatcttgttttggcattcgatctgttaaccattcttcctgtgaggtaaggtatccggatagtgcagcgatggcttcaacgcaacatcaagatcgtacataagcggagcggggcgacgacacaggcaactttcacgaaatttatgaagtttctcgggtattaattatgtaaagtggcactgtaccctcatcattgatgatttatatagtacctctgttgatgaatagcacattgggtatataaattaccagacatcaaccaatggcaaaatcagattccacccggatcctcccttagctctgaaataaatttcagaaaataactttcatgttcaagggcaagggggggggggtaccaaggatggcgggatttttaaagtggaaggtggggtactattagtgggtggggtactgttgcaaatcccctctaaggtgatcaaaaatgaaaggtggggtactaaaagagggcggggcacaaatagaggttttacagtattaataaatagggtaattcccaaaatacggagtgctggggaaacttttgacattttcaaccttttgcgaccaaacccggagttgtgggaaaacttattcccaagaccagcctatagaatcgtagaggtagccttcactgcagaaaacaccagagactcaagagcccagcacgccgctccggacgcgccgctggagaagacgctggcagtcgccgccatcatggacggcacaccctccggtgccttgctgtccacgaccgtgctgctgcagtaggagagcgtggtgcgctcgaatacgagaatggcaaatcctgacacatatcagaataatgaaggacaaagtcgcaaaattagtaaatatatattgtttcgtttgtaggaattcgactggaacgtatctcctgcgcctgcttcgcagccgaagcatctactaactcgacttggaacctgtctatttctcagcctttgccacgatcaacctctgcacgcacaaaaaacttttggctatacttgtctgtagtactctacgttgcaaggctaagtttgcatggccctagtgtacgctgcaaacaggttggcaaatttaaaaatacaaactggaagtggtcttttggaaacgtatttgcgattttgctgctctgttggcccctcgagcgacctattactgtttgccgaattcatattccacgtacatcctacgacatagtcaaagttatgaagtaattatggtatgcatgagtacttcgcctagtcgacgtcttcttcatgccctgttcatgccgcgaatgtcctggttgcagctgggatgactgcctccgctcctgcgacgacccaaaagtcttgctgcccgcagagcttgccagagtcgatcaggactggcgccgctcttcatgcgcaactcggcgtgcaacttccgttaccgtccgcgaaagtgtaccccgcaaacacgttagttgtaacggggttacacgagagttacccgaagggttacgaagtgggtacacactgtctaacctaaatcagtaggagaatcagtactggcttcagaaccactgattatgcatatgactagggttcactatgctagatagtgaaccggatacatttacaccgtaggcggagaaattaccttatccgagtggacatccactcggaatttgctgcaggtaccagcccactttcttataccaaaagtaacaataaacttttataagaataagctactgttatttttagtaataatccccgaattatttttaagcagagcgccctcgtcctcggttctacttcatgtatttatagcttcatcttcttgcaagtctcattctcagctcattttactacctccaagcttcctcgcaaccatctcttcatgacgtccgtcaacacctatggggagatccaaagccaagtcaacaaggtcgtatgggtcagtaccgttcgtgctggacgcctctgatttagctgctgccaagtccctcggtctcctgcgtgaagaatctcccatcaacaccacagacaaccgcctgccggactacggtgaatcgtacgacaagaagaaaaaacattggcactgacctttatgcatcccagcaagcagtccagcagcgctgtaagtagtttgctctgacttgcggcttctagatacttgttgctgccagcagctctgccaacgcaaagtacatctgcaaacaaatcaacgaccagcggttcttcgacgagacgatccccggcgacgaagcggcttgcccatttttgtcaacgtctctagcggcacgggtgcatggcaggttaccaaggcaaacgtttgccacaaccatttgaagaacgtcggattctccgctcgcccgttcgccgagggcacgattgcgcgacctgccaaggctctgcggaacactacacagcaaagtagacgggcacaagcacttgtggaacagaagatgcttcctacgcacaataggtccgtcagcgccttgtccggctccgctattgcggcgttcttactttcggaaggaatgcaactggccccctcagccatttcgaggattaaagctgctattggtgaccagttgaagggcgatcggatattgagctttcagaagttggaagcctacttgctcagcatggtgaaaaaaaaaaccggggtcgctcatgcggtttgacaagtacagtgatggtacatttcatagggcggccttcctccccagtattggcatccggatggcccaattttctagatggatgcaaggcttcgcaggggcccatctcaaaggtgagatgaacgggttcggagtataccttgttgcgaccgccaaagactaccagaagctggtcacaccctgggcgttcgcactggttcctgtggagaactacgacaactgaaactggtttctcagtggctctagagccgcttaaacgttttacggctgtctcagaccgtgacaagggactgctgagcgctgtggcggaagtgtttccgctcgcggggcatcggttttgcttggaacacatcaaacgcaacatatgcagtgctcgcatcccgctgaccaacgatgaacgcaatatcatttaggacatggccgacagcgactgcgagaacgattttacgctatttcgctccgagttagcgtccacaaacgttcgagcggccgagtaccttgatggcgttgaccgcgtgcaatgggtgaaatatgcattactggatcggttccacgtcccgacttatagtgaagcgacatctaacctctcggagcaggcgaatcattggatcggcaacgagtaccgaaaagccaagccgctcgatgctttcgattggttcttcctgaaactggctgaacgggcatctagtatgcgtcaagacgcattgacttgggctacagcacatggcgacgacgagctggccccattcctgcgcgaaaaacgtgatcagctcgcggccgctaccagcttctgcaaaataaccccctgtctggaaggatcttacatggttcgatacatgggtccctcaaagcatgacggctacattcatccttggcgccacgtcgacctaccggcgcggagctgcacttgtggagggtgggaagacttcgagtttccctgtgtgcatgcggtgtgtgctgcaattcgcgagggtacgcgtatcagcagtgtttacgacgctaagcggctatcgatcaagcactttacggcaacgtacacaaagcgctttatcccgctcccaatcgatggacagctacgcatcgatacaactttgaagcttccagcccttcagatccccccactccagaaaggtaaacgaggattgaagcccggcccaagaccgaagcacaaacgtaagaaaacgaaggacagttagtaggagggaggcctgagagcagagcatagtctgtgagacccgcgcatttttcatttctttcaggattacactttataatatatggtatgtttttgatgataacgaaagagactcatccagaaatgataataagtgctgtggtttccatgatagcgttccctcttatgatgataaaacgccacaaatgatgataaacgtcctgaatatgatgataggatggcagatttgatgataaattatccaaaacccattgcagaaaaaacaaagccgatgttttattacactgcttccgaacacctttttaattttttctaaacgttgtgattttttattgtttttactggcggcattgaagattttcgattaagcttcaggcaactcaattttatcttttctggcataataataaaaagaccttactactgcgtgcctgccaaacgctgcgtatggcgaacttttgagtgcccgggggaacggtttctacccttagcagtaagcttgaatcatgcgctcatcttggagacgccagcttcaatcagcgttgtgcgcggaagcgtgcaatgtcccgagtggtcggaaacatcgcttgccacgcctccagggggacccccttcttcttacgagcgtagtagtgcttggccgcgcgccgattcgattccttgcgtgctgcagcacgtgcagcgacggatgccagatcgcacttcaatttcttcgccaagtgcttcttgagtccctgggcggtcttcaatttgcgggggcaatgcgggcaggttcgccggtagttcttcttgggccgcccgaccttcttgcgagtgggtgcaggttttttcgatcgggcacctcgccctccgcccagcttcattgccgagaagctgatcgagaaatgagcacaactggcagcaccgagcgctgttgaagaaaggtattggagttagatttacagcacaaaggcatgatcatattctgtcaaattcattgaagtttgtttggcaacccaactgtaaggtcatattctgatacctatacctaccaatcaaagtgcttctctgataaacggttgtcagcacaatccgagtggatgtccactcggataaggtaattcctcccgtaggcggctttgccgcaataaagggaaatgcattcagtttgagatttacacacttgaaagttaagggttgactcttggagtccgtaaggtgtacggactcgtacattctggtaatagaacgggctatcttaagctgagactctgtgcgtctgttacgtattcctctgacgctaaagctacggcagccccgctgcacacttggtagcacttatagtcaatccgacacctgagtcggtatagactgaccctctgtggagaatggagcagttcgctcacttgccctcgaaccagcaggatgcggttaaaacgctcatgtccttgctgggcccgaagggcgtgacgcaacttgcgcaacaaggcctcgacgcggtgaacgcgcgtctcgaggcgttttcaagctacgagattgctctgctagagcacctccagcagaggatggcaacggccgcggtgccccaagcgcccgcttcgtcatccgacgcgggaacaagacccaagccgcttatgttgagcgtgaagaccttcgaaggcaaggagggtgaaagcttgatgctttggacccgtgaggttgagatggctatgagctcagctctactccggacggagtcgtagcgcgtggcactagctatctcgaagctcggtgggcgagcgagagagtgggcactaacgtccgggacgtcggtcgaggtggccttcccgacgtgggaccagctgaaaaagcaattgtcccgagtgtttgctccgcctaacgaggcgtatcgcgtgcgctcacgcttcctggctactcggcagagcaagaaggagttggtgggctacgtccaagagctgagaactctcattgcagggatgtctgctgacccgttgccggaggaagtcaccgctacggtgttcatggagggccttcgcactggcattaccaggacggaggtgttccgaacccacccaagctcttttgaagaggctgtgagcgtcgcattgaatgcggaacacaactttaagtcgacgagacttgggtggaatgcgtcttacgctagcgcgcgagtggtccggaacccatggacctcagctatgctgaagacgaagaagccgagcttcgtgctgctgagcagcgtcgcggtatccgcagatgcttcatctgcggtgacacccgtcacattcgtgctgggtccatcagcgccaggcttcgtcaagccgctcttcgagttcgggccagggctctggttcgtctcggggaaacgagaagtcccagtaggcgcagggcggcctactggggaagaactaagttctattgagcctcggcgaggtggaggtcgacaggacttagccccgaagagagccgtactctctaacacggaacgtgtatgcaagccgggcttgctagttgtccaagcttgggtgaagggcttcacgaagccacggacgattttaatcgattcgggagcgtcgggtgactacgcccagcgttctacgatggacggaagtcagctttatgctgaggcgctggtagcgcgcgggagtgacatcgtcactgttcgtctcgcgacgggcactcgtgtcacggtgcctaaggtccctgtggacctgggcgtgaagtgtttggattttgatagcgtggaacgctgtctggtcttagacctcgattcgagatatgatctcatccttggtatggcgtcgctggaacgccacgagccgtggatcgattggaggtcgaagacccttggtgctacacacttctctcctgggggagcattgacgagtcatgaacccacttctgctaagaagcagaagcgcttctggcgcgagcactggaccgagtcggtcaatgtgctggacatcggagtttctgagttcgtggacactgagtgtgtcgacaacgagcgttccgagcgtggctcgcggacggcaggtggagcggcacgaattctacagagcgggcgtgcgtctgagggcgccgctctgctgcgtgccagcgccggcgcggtcggcacgatgacgaagaacaaggggctttgcccggatgaagatcgtggggtggtacgtaatccactgagtggaggctgcggatcgtgcagctcttcacgagtgtcggtaaagacactggagcccccctggagttgaacgaggtggtgacacctggcgtcaagacgcacgcgaaatcacggagctcttcagggcggacagtgtccatgaagaggaggcagcgccgcaaagcgctggctgcgagacgcaaggcgtctgcgacctcacgagtcgagaagggcgtgtcgagcggtgaggctccacgcgagagcgagcagctctatacactcgtgaatgtagtgacgggcaacgtcgacggaggtatcaacctcgacgacttgccctcactgtctgctctcctggagctggaggagatgtccttggccgagttcggcgaagccttgaaggctggagacttggctgaggtagtggccatacgacccaaagaagagttgaactcgtcctcgcttctggatgaagctgtcctggaaaacaccaagcaggcgcagaatgcgcggagcggatcgtcgatcctgaaggacccgtcggatcccttgtatcaagtggtaaaggattaccaggacgtggtctcgaaggagccgccctcggggctaccttcggatcgaggtgttcgacaagaaatcgatctcgttccgggaacgaagtactgcgtgacgaggcagtggcccttgccgaaggagcagtgtgacgtcattgacgcgttcttccgtgcgaagcacaaggcgggcatggtgcgtgagagtatgtctccacactctacgccgaccttctgcgtcagaaagccgaatggcaagtgcattattcaacaagctgaatgccgctaccattccggcgcagacgccgatacctcggaaggatgttcttcggaacagcatgacaggaggtacgatgtacagtgcgctcgacttggtcgatggatattacgaattgctcatgaggacgagcgacattcctctcactgcggtgagtactccgagcggcatgctctgggagtggttggtgatgccccatgggctttcgaacgcgccagcgacgttaatcgtcttgtgacgcagatcttcaggccccatcgggcgtacgcgcaaacgtacttctatgacatcttcgtccacagtcgtgcggagcacggaaagactgatatggagaaccatgtggagcacctgcgtgatgtgctcgaatgcatgcgtcaaaacaagttgtacgccaacattgacaaatgcatctttgcctgagggccggcccggtcaaggtcaaggccattgttgactggccagttcccaagaaccagaaggatcttcgcaagtggcttgacttggccaattacttgcacaagtacggcgagaactacgctgagatggctcggccactctccaatctcctgaagaaggatgtgtggtggtgttgggacaccgagcatcaagatgcgttcgcggccataaaggacagtctccttcatgcgcctattctggctttgccagaccccgctcgtccgtttagtgtcgtctgtgacgcctcggactttgccatcggctgtgcactgctccaagcagacgccaatgggtgcgagcgcgtggtggcgttcgaatctcgccagctgaaggctgcggagaaggactatcctgtccatgacaaagagctacttgcgatgaagtatgcgctcgtcaagttcaggatgcacctgttgggctctcagccattcgtgatttacacggatcatgcgtcgttacggactgcggctcagtcgcctcacctctcgcaaaggatggcccgttggttgtccttcttcgcggagtacaacttcgaggtgaagtaccagcctggcaggcagaatgtccttgcggacgcgctgtcgcgcaggccggattatgagctggctcatgtaacgaccgtgacttcgtcattaccggatttgatccgaacggcttatgccaaggacgacacctgtgtcgcgttgctggaggctctggggagcaaggagtttcaagactcggacatagaattgtcagcgcggctgcgcgcgcggctacaccgttattccctcgatgatggcctgttgttctacaacactggccccgaggatacgccccgcgtggtcatccttcatgatgaggatctgtagtaccgcatcctctataaggcacacgacacgccgctggccggacatcttggccgtgataagacctacagctcggtgagcacccactactggtggccgaagctgtacaaggggacgagcacttatgtgcgcacgtgcgagacgtgccaccgagtgaagtcgtcacctcatgctgcagcgccgttggcgagtttgcctgtcccttcgggctgttggcaatccatgagtatggactttgtgtttggcctgccggcggacgaggcgggcaacactggagtcgtggtcttcgtggaccgactgagcaagatggctcacattgcggctgtgccggacacaatcgatggtaaagttacagcaacgctgttcttggaccgagtgtttcgacaacacggactccctgagtcgattgtctcggaccgagacccccgcttcacgggcaacttctggagcgcggtcgatgcttgctacgttgctagtcaagggtgactggacgcgctgcagtggctggatgaagggggaaaggttgatagtggagacgtgcgaacgttggtaaatgctgccaaaggaggacacgtggaagttgtacgctggttgatcgagcgccgcggttcgagtactgaagctatagcagatgcaatgcttgcgactcacgccgcagctatcagagggcacctggaagttgcgatgttcctgcgagagttcacgaaagaagcggagggctcattggcaagtgtactgctcaactgtatcgagcacaggcgagagttgtgcaagtttgatgtttatacggtgtcaggggaaacaatgcgaagggctgaccgaaggatgcgtacgactctgcgagagcgactccttactccacagtctacgactgtcgcggagtatcgagagaggctgcggctgcaagcccagcagaagtccgtgcccgccatgcggacgtacccggtggtacttagtccgggtgaagactcaattgagtacgaagctcagttcgagtcttgggccgagcacagccgaaagctcagctccatggatgctctccgagccagcttcagtgaagtggatgttcgcattgaacgcaagctccgcttcgatttcgcgaaggtccgagccaagcgcagcctctcggtacttgcccagccgcagacccagtttagcgctgcgcgcttcgctccttcgagcactccagccgctccttcccgcgagggagtgagcgctgtggctcagggtcatcctcggagcaatgtggctgacccagcagctccccagctgattaccgggaagcgcgggacggctggcgagccggtcttgagccctcggggcgctggtgatcgagctgattaaaagtgtccacgacgtctgggcaatcctggcggaggggtacctcaagttctcggagtgagggtaccctcgccatttcaccagatactggttttgaccccggcaccgccgcttcgccaggaggccctcgacatagtaatgcagattcccatgctcatcgagcagcgccggcggaggacgcgccaagccgcctcgcgacgttcgacgagttgcacgagactcggcaacaggcggattgccttcgggaccacgtccacgacattgacgcgcgtctggcacgttgtgcgactgatctcgacaggcacgctgagcggctggggtggattggggtgcctcgggaggtctgggaccgacatgggaccttggagaacgacttcgtttacctgaacgggtgggtgaactactttcgcgatcgttaagagcgacacgctcgagagttcgcggagctacagcggcatcaggctgtgctccagggtcagctcgaactcctggcccgcatgcaggcctcgcctgctgcgcctccagcgcatgcggctcctgcagtgcccgcggcactcccgcctgtgcctgcggagccagcgttgatggtcgcgtcttcgacgccggtgactgcgtcctcgacgaccgcgacctccgcgcctttggcctgtgacctcgccaccctcggtgcctatatctgcacctgcaccgggtcctggtacggcttgagcaagcccacgtagtagacggggtgcgcccgcatcttcttcggaagattgagcgtgtacgcaaggcccttcttggccacaaccttgaaaggtccgatgaagcgcgggagcaacttcgtcttgaagccggctgacactgcatgtgtaggtaggttcttagcgttaagcagcaccaggtccccgacctcataactttcaacattgcctctgcctctggcatctgcatgttctttttactgggcttggctttcagccattgcgtaacgcacatgtcgtaagacactcagacgcgtcgacaagaaagcgccaacctgtttacgaacagtaaccgagctgacatcggctagccgatcagctaagtcggcttctccccccaccccacccaccaagcccgaggccaccacgtggcggcgtcagcgggacgcgaggatgagacaagcgatttacgtagaacggtgtgtagcctgtcgaggcgtgcacggcgttgttcagcgcaaactcaactgaggcgaggccgatgaaacctttgtcgcccaggggggttcgtatagcgcagcccaagactgtttcccagggtgtagacccagagaatcgacttgagagtcaacagcaagaagatagacccagagattcgcagccgcaaagctctaaaccctgaaaatcacactccttggttggcgtgggtaccttgtgtaatccctgtcggctcgtttgtcttcgacggaacaacactccaccggttgtaaatgtagcctcgaagaagtgcgggagtacacgtctacttcagaacgcacctccacaccaaaggtaaacccagagaatcagatcacccgaaacccagaatatcacgaattcagggtccaggatttcagtcaactccgggacttggaactcagaagacaccttacccaaatgccctcctagctcgataaaaccaacaaatacagagtatacaaacactacaactagccgtcacttattcttttggacccttggacgctgggttacacacactaggctcactcgagtctgaaattcaggggccttgctcccctgagactcacacaaacacgcaccaccaccaataaaggaggaaaatacaatcactatcagttaccttcccttcacacaagcagtcaatacaaaatcctggaggcgacaacctagcaccccagaataacctctggaataatatgaaatgggctaccacgagcacagcaagtgacccaactaggatatggaatagatggatcactccaggaaggtcaaggccgtcgctggtccccacctaactggacttgagttgatggagtccacacagacggctgtccttcgccgttgatgtgcccttagcgtcccgcggtcgtagtctcgggtcctccggatttccgtcggcaggcttggccgaagtcacttgcgcagtacagggaaaattgaactctgtttgtcttttatcagctacttctctctttctctcttacttcttcgggcaaatatcttctgttcactatgcttggtgtcaaatgtcttgtcttgagtataccttgggttcagcggtccaaacttgcgatcggcttgcgaatccattgtcgcacggcgtcgaaagtgccaattgtgggtccttagacttggtttagtatggtgcaggactccctcccgactcctcaaaagtatccagtctgcgcatccacaacggttcttcaaggtcacgcatcactttgattgcagactgacttcgaactgactcgaatccctgagaatcaggtgacatcttctgaaatcctgggaattctgaggaatcttggggaagtgtagggattcttgggtgttggctcgggaagctcttaagttcagtatagagagtctggatttatggtccaaacccagagaatcatctttggaactctggcctgcactcagggaggtgaactctgggtcatcgtgcggcactctggttttccgtgcggcactctgggtaacaaggctgctgcattgcaggctctcgtgtatctccacaaagccacacttttagcggatttagcggcctcgtgcgcatgaccatggtggtagtgggtggattctcagggtaatttgatcctctggggcactctgagccacagcaagatgaggtgtactctgggatacattcgccagggacactttccgccagactttaggcactcatcgtaagggaaagtacgcggctggactgagtgttctctgaaatcctgggcgtgcacacccaggattcacacgtccagccagttgggcccatctgcggtcaggcgctggattcatcccgacaaatcacttctttcccacagtcaccatccatgtcacacgggtacagccgcgccgtatccaagtcatcccccccttgtcgtccaatacaagctccaattcatttggagactgcagtagcggcaccggctgtcagctcagcctctcggccccctgcctcgggaggtgcaaccccacgcagtagtcgacgcacccagaaacgcaaggccgacgttgaagagcgatcggcggaacgcaataaagaaactcccccgtccctcggcctcggcatttagcctagagacccttctcgcggcaccacctgttcttccggcagcgcccgccgtcgcatcgaaggcaccgcagtggcgccacctcgacactcgattatctacttggatagccctccgcatactacccctgctacgcgcaacccatcccagccgatgtcaccgggcagtcaactgcttcaacaatccgaccactacactgatgataccttcgacctagcatcctttctcgggacgaactcgacgctcaccgcaggcaacacaagcgggcaccattgcttcctgaggcatgccgcccgcaagcctcacctgcgactggcgatacggatgaatatcgtgacggtgccgacatacaagaacttgacttggccactatatggcggtcatggcccaatcagatgtccattacattttttcagcgaataagcatccggtagatccctattaaggccaatcaatatggttaggggtaggtatatttgctgccgacactatgccgacgtataatgtcggcaacgcggccaaaatatgtattcatccaggaaatctaagtaataaggatataatatacatatctgttctgctgccgataagttacttagcttttgtattgcctttgacgagctgatttgagccgtttgcaatagcgtttcaaccattgccacgagctcaatcgagtttcctgggcacgcctatcgacctacccataacatgaacaagcagcactcagtgagagctgctcattcagaagtgtcgctcaggcggagcttgctgcataccgcacgagcgaagcgctaggaatcactgcagaatatacaagaaaaccattaatttattccatttaatatcaataacttattcctactcaagagtactagacgctagtggtggggtgtgactgcggagcattccacctgcagcgataccccaccaacagtgccagtccacacagcagcagcagcaccccaccagcgtcgtgttgttggtgccaacaccagcacgcaagccgcagcaagccacagcagccacgccctcctcctgctgcacgcttccctatgctcgtcgactcccagcaggtcgccgcgcccttgcacacgtttccctccgctcgatgcccataccgccctcgccttggcggctaccctccccattgccccacctccggtccgccgcctcttgccgttcgctccggttctcctcctcctccttcccacggcgcggccgtcttgtcctgcgccgccatcctgatgcccaccgccctgcttcaggtaaccgtcatcgtcgtggtgcgcgccatcttcctagcctccaccgcggaccactcgcccgccgtcgtgcagcctaccgccgtcctcccagacaccacccacatcttggcaggcggaactatgcagcccccccccccttttcgccggcgtccttcggctccccgccctccttgatgacgccgcgctcctccatccccgctcctcccacctgccgtccttgcctgcatcttagaattgacatttgagtcaaatgatttgaccaatagattaaccgctcaactagatgcttatttctaccaatcacgacgctgtcggccactgtcgaccgctgtcggccactgtcgaccgctgtcggcaccgtcatggtatggtagccgacctcgcggcccaggtcggctccctgagcgctatggtcatggatttgcggagccagctggcggcggcaacggctccagcatcaacattggtagtccagccagtgttggcaaaaaactatcgaaccgatttttattttggacctctgtacaaaacacgaccatttacctgtttaaaccgatttgatgcgaccgtgacttgcttgttattcaggactcaatagaaacatcaagtcaagtgcgacatggctacaacaataaaaatcataaaaatattttgtttagatttttatccgcgataaaaatatttaaatatcttttttgccaacactggcccagccggtgcgccctgtaactcaacctctcattgctgccgccacgacaccggcgtcgtggacacttgcggccgacggcagctaccccctgtcccccgctcacttgcggggcttcgaacatcgagttttccgttgacgatgcaccggaacagaggcgactacgcgccccagccgactcacattcttgccgcctaccgcagtatcgcaagccttagcagatcagatggtatgttcactctaccaaccgacacgatgattagctttcgcgtagcattcgatatcccgttcgacatgacgatcccgaccgcgcatggactatacagcgttcgacttggatcccaaggcctgtctctctccagctttcgacccctctctgatgatgaacgtttgacacgcagttcgaacaacgcgaacttctcaactgacttcagctcaaccgcgcaacctctgcaggccccggccacgtgcgcgagctacgacgacatcttcctggcactttcgccaacattttctggtacccgcacatgatccggctggtgggcagaatccggcggttcgtgtctgataacccaattcgccgatcctagcaacaatccgctgcgcgtaactcgcacgttgcagtacgctatcatgtacatgagccgagcggtaagccacctgccggacgattccccatcgtggtggcgtgacttctgcgccgctatcgaagcgatcgaataccggtccttcgaatggttgcttgcccggcaaaacctcccatcgccctgcaacgaacgcccgccagcacatctctcagcggcggccggaccaaaccgccgccgatcagcccggaccactgggatgcccgagcacatccgccagctggtacctcggcgcgcagacggaaccgaaccatgcctccgtttcttcggtggaggcatgtgcttcggggattcgtgtgagcgatgcgcatagtcgcaccgaacccaccagtgggatgccccgctgcaccgggacctacaatcctacattaaccgacagtacggctcaagccgccgtggccacaacgggcctcgccgcagctgaagaggccgcgacgcggctggctcaccagcgcttcggacccaggcactcacccagaataatgcacacaataccaccgttgcgttaatctctaccaaatccacagagcccttgtttccgcctgtgcggctccaatacgaggagaccacagcgcgttccactaaacaaagagtaaatatcaaaaacaccgtccgttttcgcgtgcagcactgcaaaaccagcaaaaacaccgtttcgagagacggggctgagtcagtcagtggtcgatcaacggaggtagccgcagcaaactcgcgcggggtgcccgcgaagcagggccgcgcggtatttgcggaggcgggcccagcgacgagcattccagcaagccgagcactgctctgggtagaacatacaatctatacatcgcgagcgaagcgaaccgcgggggcgccgaaggggcgcccagccaagcgaagcggggctggtcactgtcactaaaccaaggcttttgttgcatcgaaacccacatggccttcttcaaatccgtatggatagttgttccgtggtgcaaatccgaggaataactgtgctgagagcacagttttggtgtttttgttagatctacggtgtagagggtactcccttctaaacaaaccgtcatggcggggctggcccccgtcgcttgtccctccactccatccaccgaggcggttcttcttccgacctcatcacgggcctctgtgtcagacgatattcatgttccgtctcgaacagacacacatacccgcacagcccgggttgcgaccccagattccacctcgcccatccacgcatccatctcgccctgcatgctctgctactggggaatcttcgagccccaccgagagcgtggtacaccccagctctactacagcgagcgcatctccaacagacacctcgccagcaaccacccgcatcaaccccagggtggcaggtctgccctcatccacacccctccggggccgaccgccatcgtccgcggcagcagagggctagggccagcactagatcggcaacgggcgcacctctgggattccatccggcgcgaaggcttagcggcagcactcgcgaccgtcggtctatcacctcctaaccgagactttccgacccatttcggccccccacatcaaccataatacactctaaacaagcatctccagtccgccatgtccgagtacgtgcgcagaacacacgttccattgagatccctcatcgatctccatcggggccagtccaccgcggattaccgccctaataagcagatcctcccacgccaaattcaaagcgcgtgcaagggttactccaaactacccgcccttctgtctattgcaaacgaaggaatccgcgtctctctgacgaagccacttccaactcaaacctctccccctcctaaccacccctcgggtcgcaatcggcttaatgtcctgcgcaaaaaatatccaaaaaaacaagaagatgcatcgtggtcgacctcgacgttgcccagtactggccggagctcttcctcaggccgttcggagtcgttgacaaaggcgaggaaggccctactacctccggccgcgtcatacatgacctatctttccccgaacaggcgtcggtaaacgatcatacgggccgcgactcagtaccagccgcagaatatgaacattgtgatgccgttcctcgcgagatactggcgcgatcagcccgatttccaggacacgaaatgccttcagaaacctcggcattcacagcgcatctgcccacatgttcgcaggtacaataccagaagacaacgccctcattatcaatttgtccgcttgcttcggctggatcgggtctccagacttctacggagtaacgggtgatgcgatcgcctttattcacggtcgaaccaccaacgccatctatcctcatgtttttttcaactaccactgggtggatgaccatgtttgcatatcggtcgacataggaaccagctgtacagatgtcgaacagtccttgcgctcagctatgacaacgatactaggcccagcgcagtcaacgatgacaaattcaccacctgggatacgcgccaaaaggtgctgggcctaatctttgataccgtcagcttgaccgtggctatgccgccctccaaaatactcaaagcgttagctctggttacaaagcgtatcacgcgactaaactgagtagaacacagtaccgttctatcttagggagcctccggcatgttgccacatgcgtcaggccaggccgaccctttatccaacggctccgacgagccgaaacatcgctccacaggtggtcgtccgttatggtgatcgatgaaatgcatcaggacctcatttggtggcggcacgtcctgacttcacctcttctcaacggtgtaccgctggagtatttccgctcccaacctgcggcagacatcacaatcgagatggatgtatcgggcaccgggttgtgcccactagatcgaaacaaccaacgctttcttatctacgaattttcggagcgtgagcagtctctcatcgctagcttcaactccgagcaccggaacgaattcgacataaattaccgggaactgctctcgtgtgcctttgctgtccacacgtgggcctccacatggtcgggtcctgccctaacaacaccccaattcacgtgcactttcggatagacaacacatctgccgtggcttggtaaaccaaaatggcttcgaagaatactcgagcacaaaccatcatcagactgataggctactgggagattctctgcttcgcatattgccggcgtggataatgtcatcgcggatgccggttctcgcctttcaaaacgtttactaacctagccggttcttggtcacaggtgcgaccccaactggacaccaatcgtctggaacaaatctggcacgctatctgcgcgaacactcagtggcaaactcatcatactccaagtacgaacacgcactccacgcgtggcaagcattcctcaccagaaaaggggtgaacgtctggttggacggggtgccactcgctacccagctccaacacctatctgacttcattctactcggcttccaacacggatatggatccggaaggcctattcggagctcgtcgatcctgaacactctgataggcatccggcacttcttcctagcatccggtcgttcctttccatcggaccatccacagatccgcatgttcctcaagggtatcagccgcctcgacgggcccccaggtcgcaaggcccccgtgtcgattcgtctcctcgaagcctacttcgcttcactcaacatgcactccccctcggaccaagcgctctaagggggtactgtgcctatcctacttcttcctcctcaggcgctccgtgatcgcagcagcctctgatggcaagtttggctggtttgccttgagagccacggatgtggtaaccctggaccaaaatgggcgagcaaccatggatgctgcagcggcaacctccgtgcacatccgcctaagaggatccaagccaaaccagagcggcctcacgaccgcccgcatgctccgtcgttccggtcatcggttcctgtgtcctgttctgggagctatcctactgctccgggcacggcagaatctcccgatggacttgccggcggcaacctatagatcggagaacggggcgatcgattccgtatcagcccgtcgcgtggccaacaaaatccaagaagcaaggatactctggggaggcgatcctaaggcctccagcacacactccctccggtccgggggcgcaacaaacatgtaccggtcgggcgtcgacgcgttgaccattcaatttcatggtcggtgggcgtcggacacgttcacaatctacacgcgcctgtgcgaattggtgttctcgcagagctagaatacgcatcaattgaacgagaggtactgaaaattgaagatatgttttctatttcttcttcaaggaatcaaactttcatgcaccagagaagcattgccacatagtccggcgtacttctcttagattcgatgcgagttgagaagacttctctaggtattaaacttaattttgatacaatccgaagctcctctactgtacatcacagaaaactgcacaagtatttataattcaattgcttggtcagagcaactaaaacctgtcactagtcgaacatggacatttccgatgtgctcctagtatcggactgtgaagacgtcgagaaggccttgtatgcccgataacctgctgcttgatccctcgcagcctccttcgttcccacttggtcgcatcattcacgcatttcgcacaaaaggagaccttccgctgaatcaactggtcgtccagcgcaataaactaattcgcttgcggatcttgcacgcgtagtacacgcagccatagcagagcttgcaggtactcgagccaataaatcctctgacccctgttgtgaccttcctatcgcacatacttcctctggttggaaatgatcaccggaaacagacattttaaccaataacttcaccactacgtgctgtataaagctgcggattggacaaaaagaaagctcgggatctccgctttccatagctaccaatttcatctcaaacgggttcctgtagcccacgtcatttttattttaccgctccaagtagcaagccgatatcaagagggcacccgccacaactgccgtacttcgtttagagtcccgaaaacatgtcgaaggccaacctggtggacatggagcgcagaggcatcatcgacgagctcctcaagctaagtgacaatggagttctaccccgcggagccttcgcccgcgtcggggcccatgtgaagcgtgacccgaccaccgtgagcgctatttggaagcgcaacacggctgcggtggcggctggtgttcctggtggcgagtggactagccggatcaagcagaacagcagcaggaagcgtaagaatcgagatgaagtgcggacgaagctggcgagtgttcctgtggaggatagggcagttgagaggcgcgttgcggctgcttcagggctctcccggcacctagtacgacaagctgtgaaagaaggcaacgacgttcatcaagccggcgctgacccccgagaacaaaatggaccgtgtcgaacatgcgctggcgtccatcgacgacaagacgttacgcttcgagtcgatgcacaacgtggttcacgtcgatgagaagtggttctacgcagaccgcaacagacgttcctaccttgtatttgacggtgaagagatgcctccacgagcctggaagagcaagcgcttcatacccaagaccatgttcctggcagcactcgcacaccctcggtaagtctctatatttttataattttatactgtggataacctttgacactgtgtatgaaatttctgtgtaggtacgatctacaccgtaagcagagaagattggagtaacgcaagtgcggcgtcatacagctctctactacacgatagacttaccggtagctcattcgcacgtcggagtttggccttccccaagtgtggaagcttgtagagattgccggattgcccgcatgcacgcctgtagcgtaagaaagatgttgtccacagtgtcgggtttgagctcccgaaatgcgtcctcaaccgacgctataagcgcatcgatgcccttccttggtagacggtgttgaatgctctgcattgaagcaaaaactcccaagtcaaggcgattgagctcggccgtcctgaaaaccacaacatggatgtccatgatttcatcatgttttacatgtttggagatcatacttggttttagtatgcatttgtgcctaaccctattccgaaacatgggctgtacggccagccttccaacatcgtacaagtacagttgagattcttaacgtccgtactgcattacaaagtatgcggttcttcttagcaacaggctgttggggcgcaaacaagtatccggacaccaacccaaattagagagattagagagatttcgcaagtgtccgaatccgattccagttcggttacggatacaaaaatcggtcaggtggctcgtttctggaaattggattgggatttcgggtccagacgtccgggtttggagcccccattccggaatctgaatccgaaacggaacgatgtgcaccacatggaaacagtgtacagcacataagcagtaacagtttagaaaggcacggcaaatttacagagcctataaattacgcttttgggagggtttaaggagcaaaagtatatgacatacaccgccttaactgtgtagtttctggtcaaaacgatcttaatattaagcttgaccgcggatagagtcaatatagcctaccgtttgatattccccgcccaaacggaccgatgtatgtgcgggcattgcattttcaggttgtttgagcgttgttggttgtgttgcgggggacaactgcaactgcaagcagtcggtggtccacaccatccatacgctacccagaaatgtgcattgcatattctgattgggactcgagttgcgaaacgaacgaggcctaaaatccgaatccgaaacaaatcccaccaggaaaactggattaggaatcggattcggacatttgcgaaatctctctaatagattgaatgacagatcaaaatcccagacaccatttggagttttcgagataatcgcatttgaagttgactagtcaaacttcggacacaaccggacattgaaaatttgaaagtgaagtttacttgtaggaagcgtcaaagcattctaattcgattgattttagcctgagtgttccgatagtgtacaatacagacaaattatactgggataggaagcaacgttagtgctgctatcgcagccttcgcggagccctagtatccgtggtacatcaagtcaaacgatgactcctcttgacatctaactggtacattttcttgaatccggtacgattctggtgccgcactgggccctcgtttatatgcgtgggcaaaatgaaccggtaggatactcaccacactggtatgacgccagtgcctcactggctccaaaaggtttataagcgtgtgcagatcgaaccggcgcgctaccgacgacactggtatgaatcagtgcatatattgagcagggtacgatggacgaagtgaagtaaagagaacgctacaatagcactagaggtaagcatttgcatattctataagcagcaaaacagatctagacattgtcggttgatattttgcatctacagtttaagaaaaaactccgaacagatgctgcggagatgaccgtagctagtaagaaaagtaattatttttaaataattacttttctattattaaaataataaaaaataaaaaggggttcataccaaagccttcgcggagccctagttgaaagaaggataggtgtgtaacgaaccgctcgcaagtcgcgtacagtactgtatccagactgtcccgccggctcgcgacttcacgggttgggttcttttgatgggctggttagttcgtacagagtgctttttcgcatcgtgtgcgtctgctattatttatttatgtccatgaaaataaatattttcaaaaaaaaaatcatttcccgtgtttcgttagtcttggtctatgtagcttgcttctcttcaagagaagcgatacgcactttgacaatacggcgtcaggactggggtgtccgggatcggcaaggatacggaaatcaatcgcctcaacaagaagatgtcgtagagttcattttcaaacatgaaatgcatccaaaaatctccgaaaactatggctaaacaattttgatcaatcgaacccagacatttctgttgtatccgaatgggaggacgtcgaaaaggctttgtaagctctgtagcccgtggcttggtctatcgccgccgtcttggcgtcacagagcgtagctgtgctgatacacttggagcagaatgtgactttccgttggattaacttgccgtcgatagcgataaacgtaatgcgtcttcggatcttgcagaggtagcacacgcagccgtagcacaacttgcacgtgctcttgccgagtctgcccttgatccccgacgttgtgctcttgttgcacatgacacagttctcattgtgctgggtctgtcgatccatcgagtgttggtgctgcatcatccacgacatcttcttcatctggccgcagaacacgaggtcggtcgctgagagcagagcctctgtagccactcggaccgatatgaagcgcacgacgtcgcctcctggcgccactgtactcgttccaaacacgtccactacgttctcctcaatctgccggtagaagctgaagtaggagagattcgcgcggatgacgttaggccgtggctgtgtctgcgggaactcgatggagtgaagcaactggtagccgacacgatccccgtttgtgaagtgtagaatgccagtggcctcgatgtacacgaagtcccgaaccttgaccagactcgtcgactgaagcggagcatcgatcgtcatccacttgatgataagcgaacggaacggctcctcctcggtaggctccactaccggacacagaatggctccaccgtcgaggtcgtggacgtacgaggctttcacgcgcatgacgtccagcgtcgggttcaccacgccgaacatgaggtcgtccaggtggcccaccaccgtcccaacgcgcaacatcaccggcatgtccttcgtgacggacgctgcattgtcctgggcggccgctgggtcccacgactccatagtcttcctgctcttctggctgctgcggtcttcgtacacatggaggtcggctttcgacttgaagtggttccagcgacgctcattcacccgccggttgtctaccacgacgtagtcctcgtactcctggaaatggccctccacgaactggttcacgaggtcgatgagctggtgcttctcttcctccgagatctccaggtccgggtacgggttctcagcgaaccggtccttccccattatcaccgacgtgtgtgtcttgtgccccaacggatggaaatcggttctgaacgtgaacgtgagccgcgtttggagttttttttgggatctgctgctccaggccatgatcagcggcattgacgtcctaccttcgagcgtccacatacgcatgtggtaaaggccgacgttcgcacgtgtgcattacagtacatgtgctgcgtggaagtgcatgtattatgtactgcatcgccgaccttgcgcttgcacattcgattcgactacacaataggtttgtgcaatataaagttgccatattccgatgctctggaatcgcctgctggaatcgcctgtcggatttgaattcatctgcaaaagcgtaaacatccaaaggggtcagctgaagcaccaccgcactgttgactacatgtactgcaaagtgtacacaggtttggttggtgctgaatgctatggcgtttgtcagtatctacagtatagtaattgaaatcagctgcacattcagctaagccagcaccaaatgggattgcagcattcagctgctggtagcagcgtccatccacttcaatgcgattttctcggtgtaccattgcatcgtcggcacgactttccgtctcttttccgccttcaatcggaatcggtcaccgcaatcgcggcaaggatggtcagcggtgtgaaatcttcaacaactctgcagtggtggcccctcaccgccacatgggggctcagctaacgtccaactcggacgaagctgcagccggctcacggtcatcactaatagagccgaagatttccccctgtgtcgttacacaggtgattgagaaggaaagatgagatcgtggcggagacaagattagctgtttcctttaggtaacctgtgcagcagttatgaaacccccgcacaggccaagaagacgcggattgtaggaagagctgcagctcgacggcattctgcagagctcattcggcatctcgcctcacgccaagcaagccaaaggaccacccacctaataatacatactagcagtagattaagactcagccaacgtccaactcggacgaagctgcagccggctcacggccatcactaaggcccttggtcaggtggggaatgtgttctgtgctacagtgcgggcaagggcttttggctaaggcacgatttgtgcttgtgattttcaaaacttgtgctgggcttctccaagtaaattccggaggactttatctgctgacctcccgtcatttttgaatcgccaccaagcacatgtaccgagtcctctcgctagtgcgtgagctagctgtaattatacggcaggccctagcgtgaggacacttgggcatgcaacaacacctcgtagagtagccactggatgcacatataaagcatttcgacgttgtcatcgaacgcacagaaagcatggttgtcgagcactttgtcgggctccctacgggcttcctgactcggactctgattggcgtaggaggagacaaacctgccttgtccttgcccgtgattcctggcacaaatgtgctccccagggaacacctcgtgtaggtgttctggaatcgggggggggggagctcctagaacacgaacgagcaaaaactgtacgattcacgccaaagttttatccaatcatatcgctagaaaatttcagcccagaacacgttctccacttgaagctattggccggaccccggggtcccgcatcatgtactgatggcggccggaattatttaattttatcgacggggcagtgataatatatataggttgtgacaattttgtgaaactttttcgactttagctagagctcatttcaccttcaagcatctagcatccagtatgaagtctaggcgaactggaggtgcagaggttcctcggcgcaaacgtgatacttaagtattgaaatcgtcgtgaccacaaagctgctgcattcgttcgttctgttaatcgtcttggtgaagatcagggcctccgaaaatagcattgtcaataacattatttcagaaaataacaataaattacgcatttcggcgggttcagccatctaccgtgataatttattgatgtgctttgtgatattacataatttatgacagttacctttatataataatgttagcgttttaccagccatcttctcgcttccagtcgttcagaagaactggaatcactggttgtctgcgttgctagttgcagctcatttggcagcgctcactcttcaattttcacttctcaagcctccaagacctcatccagcatggttcgcgctatccgcccccctcgccctacctacacgaactcccaagtctcggggttttacttccgcccgtgtcgcgacgagaacgacgaggtgattctcgagtatttccgttgccgttgcggcacggttcggaagcaaacccataggaacgggtactccaacctgatgcaacatatcaggcgggagcaccctgactacgagaccgtcatgctcgacgctacgacggcggagacaggctccctcgtgaacttcgtccgccactcggcgctcaacctcaacggctggatggtttggattgtcatgtgcaacctgccactctctttttgtgagagccgagaagctcggcggtacgtgtatgcataatgtcattgtgtttacattactacggaaactaacaactttactttatggatgttattcagctactccagcctggaccccatctcggaggaaacgctgcgggctggcatggacggggtcgtcgtcgccgtcgagcgttcgattgcgtcggagctcccagcacgcttcggcatcatgctcgacggctggacacacgcatcggagcactacatcgccgtgttcgcgtgctatgaggtgaacggctgtcccaagacaacgctactcagcatggccccgctgctggacgcgctggacgacgatctctccgcgcagggccatctcgagtttctagcgaccatgctgcagcgcgattacggcgtacagctggcgcagtgtcgcttcctcgtagctgacaactgcgccgtaaaccggcggctggcaactcttatgagtgtgtcgcttgttggttgcgcaagccaccgcctgaaccttgctgttcaggcggacatggcgtcgcatgaggaggacctggctgctgtgcaggcgctcatggtaaaattgcgtactctcacccaatctgccaaactacggtaagcgccaatgtgtatgtgtggtgtgtcaatatgtctctaacacattttgtatacttttgtaattttttacaacataggttgaaaacgccacttcggcctgtcattcgccaggacacgggctggagctctacgttcgagatggtacagcgctacctccagctcctcgagtttcttgacgccgaaggcgacgacctcatggacctgctgccgccgccggcgatgaacaagcgactgcgggcattgtaccaggagctgtgcgacatcgagtcggtctcgaaggcccttcaaggccacgacgtcgacctgctggacgttcgcgagtggttcgacgagctgattgctgtcaagccacaatatgggcgctacattggtaagtttataactgttgaatttgtgtttaatattttcactaacaattgtataatggtttttattttgcagggcctcgggccaacattgtgcaccgcccagattttgaggctgggtgtgtacgcgttctccgcgggaaggcgcagcggctgacgcgtgctgaaaaggccgctttgcagcccttcgaagctgccagaccggacgacgcggccgcgagtgaagtggaggaggatccagccgcgtcgttcgtggagcgtcttcggaagcgccggcggcttgcacaggaccgtgtcaagtatgagcagctgaagagcatcccacccacgtcgaacgtggtggaacgcttcttcagcattgctcgggtgacgtttggtcatcaacgacacggcctgctgccacgcacgcttgagacgattttgtttctccgccagaatcggtcgtactgggatgctacgactgtggacaatttgagctagatgataagctaactggtgtcttgttaatagacttcatgcttttcatagtggcattatttattgtggtacgttgggggcaatgccataatgtactgttgtattggtaggagcgtcaggggataatttattctgcaacgaccaacctactaaataaaaatgccatattcggaggccctggtgaagatacgaccaagcagattcaagctgactgctagaagctagcgcctactacagcagcagcggcgtcgagcacgcaaagttgcgaactctgcagctctgtgcaactcgagagtcgatactacaagagatacatagcatagatacatacatgcagcacttaaatttaccgaatataccggttgcttatgacagctggcgacccaggggtcccgccaaacgcttcacttgaacaagggcctaatagagccgaagatttgcccctatgtcgttacacaggtgattgagaaggaaactgtgtacgtaagaattcccgtggaaggttctaggcagacaagtatgctcacgatgacaatgataagcttagtgtaattttgctaatacggagggaacgaccgcactgaaagaacgaaagacaaatgaaacatcacgggaagttgcggtgtctgtaagcttctactgtatacagtaatacgagttgcggtgcattggagtaagaaaaagaagaagaagaattaagcgttgtcggcgcctcgagcgtcacaatctccaggcatctcgcaatctcgcaggcatgggaagtttacggcgaccagcgaagtccccatctgtcgaaatggcctgacgcgttgtcaacatcctatctgtcctacctgaaggcacgcacggccgcaactctttgatcaagtgatggggaccgtggcgcccgcaagccaaagcgtggtaagctttcccacagttcacagttcgtactctggccgggactcagtcgtcgatttgctgcgtacgtacgtcagcgcccctccaaccccctcaatggccaaggaccggttcgtcaatgcgaatccgtacccggagctcaaagtgtccgacgaggagtgtctgcagctgatcgagcttgtcaatggcttcgtggcggaccatttccagaagtacgaggacttcgtggtcgtggacaagcaccaggtggacgaccagcgctggaagctcgtgaggtccaaagacaaccaacacgtgtacgctgagaggtccaagagcaaggatgacatcccagtcgtgttgagcgtcggcactttggtgggggacgtcgacgacgtcacgttcggagtcgtgaatcccatgctggacgtcatgcgcgtgaaggcctcgtacgtccacgacctcgacactgtgtcccgtggtagaacccagcgcggaggagcccttccgctcgctcattatcaagtggatgaccatcgacgtgccgctgcagtccacgagtctggtcaagagccgagatttcgtgtacattgaggccacgggcatcgtccacttcgccaacggtgatcgcgtgggctaccacctgttgcactcgatcgacttcccccagaccaagccgctgtccaatatgatccgaggaaatttatccgtctttgggtttttccgacagctcgagcacaacgccatcgatctctacgcgagtggtactgtagtgcctggaggcaagatcgcgcgctttttatccatccaagtggctgcggaggccctgttatccgctacgaattacgtgcattgtggacagatgaagaagttatcgtggatgctgcagcaccggcactcggcgttccagcttcagcatcaacagcgtggggagaagtgtactacttcctccggttggaaatgatcaccggaagtcattatgataggtcggcagtttttctgtgacggccgaatcttatacacgacaaaaactaatttataaagtgtactttgagttcaaagaaggagaaaggtatctacttcgaagtacttttcatttaaagaacagtgcactaccacggtttgaaggggatggcaaggtggggctctggtctttcacggagaagtataaggcacagcgtaagagcaagaatagagccaagggggaaatttgcacacgcaatcttgataccgtcgatcgaaatgtctacaaggactatctgatcaccaaggtgatcccagctatcaagtcgaagtggccaaggaaggaccgtcgccagttcatcttcgtgcaacaagataatgcgaagccgcacgtgtcgccaaccgatccggacgttgtcgcagcgggcacagaaggagggtggaacatcaggctgttatgccaagcacccaaatctactgcaaatccctgggaactgggtaatcgagctgctaaatgtggttcttcctgtccttaaaacctttagaaggccggcccagcgctaggcagggaactgtagacctaagccttgcttcggggctacgtttgcgggttgttcatgcttctcaaacgccactgatgccgatttggtctctgcatcacgatagatttgcgggccatttcaccccctccaatccgaaaacatgggctgtacatttccgatgttggaacgagaaacttgctactaccggtactgtaccaaggaatccttgaaggataccgaaatttagatctcatactacagacagatctcttacttcatactaggcattaggcaatgatattaggcaatgatatcgcgccatttacccagctcatcagttgagttctcacaatacgtagggtataaatagagcaaatgcagcaaaagagggccagtcattgcaagagaacaaccatggagcgcacgccaagtccgcggaaagctctccaggtcagcagggagggcggacacgcacaacaggaacaggaaagctgccgaagcagtttaagcgtgttgctgtctcctttcaacacaagctcagcgtgacgctagctgccgtggaggagatagatctagacagcagtgtttaagggtaccggtaattaccactttgcatgatgcacttcagaatacgaacataaaatcgtcggtacatgtacatctcgtgtccactttgcaacacaacaacttcaataatcagctatatgtagtatgagatctaaattacggtaccttggtacagtaccggtagtagcaagtttctcgttcctacatcgtacaagtacagtcaatcccagctggttccctccctccagctgaaagattgcagacatatagccggacaaaccgtgcctattaatagtttcgcgtgcttggttggcacattgcatgcaccgtatggggatgtttcatccgagggtacgttaaatggggtaactttctcggatcagcattttctgccccagctcggggcagctggggtaaccatggtaactttttccctactgaaacagattcggccctggtatcaaaatagccgggtagatccacacaaaatcgttggttagcaccacagccagccctgcatatacagcagcggcggccgagatgctggcagcggcggttgtgcttctgctggcggcggttcgacactgatgctgtatggctgccaaccagctcactggctgcagcctctagacagttattactcttggaattctataggtgtttacagaaataggagatgagagtcaaaagttaccccatttattatcgactcgcgttttaatgatttacctgttataactagtttaatgccaatgtataaaaaactaaatctcgcaggtcttaagcctgttcgatttgtattggatcgagtcggattcagacgattcgatcgatttgaggagcgtgtcgacttgagatcgtgcaaatccgattgaattgcgatacccaatcgtaacgattaaatttttagcattactaacgtggagctactgtcaaatcgtgcttcgaactccttcgaccgctctagcggtgcacctactggctattaatcaggcaaatatagcaggtctacgtcaacttcccagtccccagcgcagcaagaagaaacttatcgaactcattccgcaattcgctaagacgaccccaacctctccccggacaccgaccaacaagaatgcgcctcacctacttcctcaccgtcatcgttgtcgccactctccatgccggtggcaccgcgctcgccaccgccgaggcccccaaccacgctgcaatcgttaacgtggcatcagctgataacgttcactctctcgataccaccgcagagatcggcggtcgaatgctgcgcaaggtgaaggaggacacggtgtccaagaaagaccatgaagaacgaggaccaggagctattctggagcgccagaccgcgttcgtcaaaaagttattctcgcgccagaacgcgatcgtcaatagggcccagggcgctttccagcgccagaacgccttcgtcaatagggaccagggcgctttccagcgccagaacgccttcgtcaaaagggctatccagcgccagaaccacttcaaactttccgacaatgcatgatcaaaatgcgctagagagctgcgtattttagtcgcatgaacacacatgggttactgagagtaatacacgatcgaccagatatttcactttatcaccagcggacacggggtggaacgggacacatttcggaatgatacattttctaataataggtatgctctttgggcgtgcctcctgacctcaacaaatgtatgaagcgcgcggttgcgttgtggtggaagaggaaggaaaggagacgcctctcccttttagagcgagcaaaaagaaggagtattcaccgagttagccgttcatttcgaaacgtgctcgaccccatagtaaccaaggcaagctggaccagaacagccggccgactaccggtacaagtgtatggcgaaatcgaccgtgcacgcggtcccggcgttctccatcaatattgcgagttgacgcaatgttaagggccttggtcatagctcaggacgtgacgaacccaacgagtgggtcccgatgctcgaattgcggcaggaagacgctcttatcttgctcgctttgggggtagctgttctgaatatagtatcggagtcggatggtgcggtctaacagtgatttgtatgacaatgcatgctactagccttcagcgttttgtagatttacttgaatagagcttcgtagtttcactcgaatagagcgcctaggcgtctagttcgagggaaggtggtagcaatagttgtacagcttctttcacccgtcgaccactatcatacaagcagcggagccccgcaagcggggctcattaaacaggtttaagccgagcacgtaggaccggccgtctcgctcggcgggaagttaattcttgatcggttgattgtacttgtttcaattcgcagttcgaagaactgtcgattggggaaggtttttggatgtcatcgaacgacattcacgctacatccgtagcggatgtcatcgaacaacattcatactacatcaaacagtactcgatcgaatccggtctgaatgacacaacaggttttgatagatgcctatttgcctcgaaacttctttcccttctagattgatgtcagacgcccacgatgccaccacaggaagtgggaccccatcccaaacattttattggacaaaagaatgcaattcttgccattttgcacgcaatatgtacaggtacctatgctgttcgtcgtagtaattgtgtctctgacaattagaggcatcagtgttaatgaatactagcctgccgacaatttatgtcacgacaaattcagatgaccacacgattttcaattaacctttctgagaaactaggcatgcagatgaaaaatctgtgtctgataaaggagggtactcaggactgaataaaccgatcgaaccgctagttttaacgctaatggaatgagtaagtagtatgttgagtgctctggagctgcatacagtataatacgatgcagtgatgtggtaatggcaccagttgtgttcaaggtctgcatgtgtgaatccccacactcattggaatgagtcttgatggattattaaaaacattccaccgaaactttgccgaaaagtacttcaagcttttaaatttatgcaatccaaatgggaggtatagcttttttattttcgttcagcattgttgtatccaaagcaaattctattggccggcaacgcggtgacgtcctatatggcggcgaacgaattctttaagcggaggctcaatgagttgcaccagatggtatgtcttctccggaggaaaggctaaaaggtagtgcaaaaagaatgacgactgtgtatgaaatcgaaagaagccttcttccaattaaggggtgaatcgagatacgaatggctcgtgtggggccatgaagaagaagctagctgcactcgctcaggcattttatctatgatgactttggatgattttatgtttgccttgtgtgagactacactgcgacccgcagagatccaccgagcccatttacaactactactggtggtgtagaattatctacttcctgatcctgtacttgtcaaaacaacttcaaagtacatttttaccgatattagttcagatcgtcctaatgcaaagtgaacacggtacattcagcttaatacttgataaatggcaatcacacacttggacgaaccgtagctgacagcttttttgttgctagatgttcaggcgacccggacgaaatatgtgtgcggctgcgccatgttgacttttaatgctcctacgtcgtcgctgtacgccccggattcctgtgcgagaggaagcccggacggacagcgtcaaagcgaaggacaagtacccgctgtatcctacccttacatgcgatcgggatctgctgacctctgtttgactaatcaaacttgaaacaaattgctggcttcgtcagattacccagcaagttcacttgagcagtagcccggcagcgctaaacattcgaatgcacgggattttacttttcaaaattttttatcgccaccggtaagtttccgagcacaatactgcaatctaagagataaaggattctgcctggacatcggcgcatatttcaatggcaagacggaaggaaattacgtttattagctagttgtttataaccgttctgtgtactataaaatatcttaagtgaaactaaatccgtcgatgcctagtccgacaagtagcaagaggtcgaattaccacggtgggctggtcaaaaagcgctgaagcacaaattcaactcagcgttgacgttcaattcatcgaagtgacgacatgtgcggtggcaatgcctgcgattaaacttggtccacttggttgtacagtggcagattaggcagatgctgcggctgcgaagcaggcgcaggagatgcccgagtacatcggttttccctgtacaagcatccgtacaatctagcttcgaccccaattcgcagttcgaagaactgtcgattggggaagatttttggatgacatcgaacgacattcatgccacatgaaaccgtggatcttcctcaatcaattcagcgctcggattgataaaccgacaactagaactataagttgaaatcgtagtctgctagctctgtaataaagttgcgcctgaagtcacatcgtagtcgcggagctcgtgcagtgtgccgttccgcaaagctgggggcgaaagactttcagaagttcaaacggagtagctacgcgcgtagaaagccacgcttggcttggtgaccattatcatacacacttgctcaagaaaattatgaaattatgcgtaatagatcgccttactggtattatttgtaaaaaagcaactccaatttatgctaggcctcgaagatggtttgaaccagttctcgaccctaaagtttctaaagtggcccgaatcgacgattacttgaatcattccatttctgggcttgctcgcagaaacgaaactttaatttaaaactgggcctgttcgttgggcacttgcctgatcggcttagccgtagtttgttttttttatgtaaaccaggttatccagtttagacatgaacacacgggttctacagactacgacgaaatatccggcaagatgaagtccggtagacaaagccgtgcaatgaacaacaagaaattcgcctgccaatatgatgtgctgttttgtacttcatagttttgtgcgtattttatgccgtgtcacagtattttcaaaatttacatatacgttagaatcgccaggtgtcgaaccgcgctgaagggcaagaacgtatgcaacccgagaaagtggactccatcaaaatacacgttttgtggagaaagaatgcaagaatgcagcccgtgctaccttgttcgtcgtagtagcatgcatcgtatagctagctactgacaactatattctacaacgttggcagggtgaattcctgcacattcattagaacgcgtctttgtagattgagcatccagcaagacttccccgaaaaatattaaagttgtgcaagccaaggtagattgcttgctactgtttcttatttgccgaaccccttttaggcacaagcaaaactatttttgggattgagaggataccatgttgtcactgaatacgtgtatcggtatttgtgatggttccttctgaaaacgccttataaccaatatacagcggcaagtagagctcggcatatgcatgtatcaagtgaaaactaattaaaccgatttcttgcagcactggcaaagttacgacctcttagtcaacagcgtttcgtttagatcctccagctgctttgggggttttaaggcatcttttgtttttgaatgataatttttgaatgattgatcaaggcttgatctcgacaagagctcatcgagtttggtttcattttgtagcattttatcggtccaaactaccccaccaaacaaaaatatttgttaggtctgaccgtgagctttcaacagacgaaccgaaagcaccttaccaggtatgtactccccgacttgtgagtttgaagcagatgtagcgtgttcaagctgtaaaattcactaccggcagggccagcgctataaattcgtcgatttattgctgttcgtcacgatggcagctagtctgagcgacatgcatccacaatagcggtctagtacgggtaaaaagctaaagaagacttctaatatctaccgcctgcacatcaccatacccggcagatgctgcggctgcgaagcaggcgcaggagatgcctgtgaataacacaactttgataatgttaacgggagattgcgcgcgcggagtctgctgcttgttttactttcaagtacttacttggctacgagatatccgacgatgtaagcacgcgtcgcaattttaatctgtgtttatctagtatccacaggtgatttggtttaatttttctgtgaacacaggctgtctactgggcgaacctcatctagaactatttcggcgtacattcaccttcattgactctaatgcttcatgtagctccgaactgcgaaaccccccgggttcaccactcgggtcaccaatcgtcacttcacctccgtgcggaagacatcaaacaacattcacacaacatcatacaacactcgatcgaatcggtctaaatgacacttacaggttttgatggatgcctattcggctcggagcttcttttccttctactgtagattgattcgtttttttagtttttggcgaggtacattacagtcatttagtctagctaacgactcagctaatgtcatggtaccacttcacaactgaggcaataagattctattgataggtgcattgacctcacaccaaaacattagcccagagaacatgcccacatgtaattcagtataataaaatctacagtgtttgctaagtgatccaattggtaagggatcggtgaattcaatacttccagcttcagaacttgattgatcctaaaaatatccttcgcaactgtactcatttttctgggcctagcactaatttgactggaccaaatttgaaaaggggtggataatgccaatatcggccttgttgtagaccaaacggttcaacaactatagcgccttgcttaactaaaataaaacagttagaatgagggtaaagctgtttcgtactttgataaacgtggaccatttaggaaccacaacttcgggtttatacctgattgtaccccccccccttcatctgtcatgagcacaacgctttcaaggtttgcgggcacacaaagttgtccacatggcacatgggcgccttccgaaattgtagccacgttgaaattcggaacacatcaactgaccaatcatgtttcgcttgaaattcacttcaacttgttgtcaacaagttgttgaacattgcactgtgtgtcgtagcaactagcctgcaccagctttagctcaatcgctacatgcactcaccgctgtactaccgctgatgtttcgacatatccacttcagtgttcctccctcggtcttaaagtttcagaaaaaggagggaaaaattgctgaaaaaggcatgtaaaatttgatttttcagggaaaaaaatcccggaatgtaggtggtctgaatgacggtagccctttccaaggttttattccatatcaaggtttttcctgtctttattctaaaccggcgctgtccatttcccaatcagcgggcggcattgcggacagaacggaggcgttcatactgtactgaactgtagagcggtcaaggagcagggccacgcagagcgacgggagcggggctggaggcggagcagacctcgacggcggcgagtgcgagtctggaggcgcgcgcgaggctcgaaattcggcccgagttggtccgtgtccgggggagattgtcccatcggaccgaccgacggcgtcgaaatgctgggaagcgaggcagatcaggcgaacagagcgtcttcactacgccgggcagcgacgggacagtgctgcggcggtgagtgtgtcggcaataacggcgagctgtgcgcggcgtgccgaggagagcagaaggaggagggcaggaggaggccggacaaggcggcggagggcctggacttcgacttcggggcgctggggccccctccgccgtgtccgttgctgtgtcggcagaaggccacggactttacggccgcgagagagaggaaacgggcgggatttctcggacaggaagaagtgccgctgcggccaggactgggactgggactcggactcactcgcagcgccggacccagcgctcttgccagagcgagcaggaggatgcccacaccgacggagcagtgtccattgatgatgtgagaccgaagcgtgagcgtgtagtattccggcggagagaggacctctggctcgtgcattgctagcctacctttggctagggcatgcagcaagaggaggtcgatgagcgaatgttaagttagcggatggcatgaaatgaaagaacgcgccaagctactcgatgcctccgaacgtcgccgttgccggtagaatcgacgggcgaacagcaagcatcgacgacacgctcggcattaacgtataaattatttgcttgaagaatctctcggtggtcaaggctcgttgcagagtacttgagtatgggtctgctgacaaacattcagagctgcgggcgtcaacgcagcgtgaacactgcatcaacaactatagtgtggtgatggtggagaggctggggcgtgacatcatcgaaagccaaagcgaaattctgctagcgaaattgtcgatgcggtgctggtgctcggcttgcttcgtgcctagcgtgtgcacctctcgcttctctgcaggcgattcagtgaatcggattcacacgtctaaatatcagctggcccagtatttctaagaaatgtcggtccgtgataactgcattgttgcggaagatagctcaagccatgccgtgcgttgaacgatagaagctgtcgagctcttcaatcgagacattgaatggccaaggacttttgtgggttgtcataagagaccattatcggccacgcacagtatgccaccaccagcatagctcggtgggccaggaccaggacttcagttgtgctcattgttgcttttgggaaggcatcattaagtctacaagtagacatgtcaacagaccacaccgaaccagggtagcaaggtgttatagtattagtcgatctattgtatcatctatccggtaagtatggttggcgatgactgctgctgtaagaggaaataatgatactttattcgacgttttagagctaggatgaatctagttaatacttgtccgctctcgataagtaggtctggatacgttctagggtgagtcaaaccgacgtctcgaaaaggaacgtgtagagctgtcgcgggagcttctcttggcagggcaagcttgcgagtcgatcactgggcaggagactgccagctgcaacaaagactcaataaatcgctgcactgccctggttcgctggcgctggaagcatccacgtgagaagtgcaccaggtagcacggctccgaggagcaggtaacgggttacttcactgcagaacttgcagttcatgtacaggtgaggtcccgtgtggcaagactcgtacagctcatcgcgtagcttcacaaagtcggagaacttcctttcgatgtggacgtccgatctgctgaagagtgtcggaggttgctgggtgctcgttagcgccgagtttgcagtcttcaaaatcgttggggttcgcgtcatggactgcgacgcagtgtacacgtcgatgacgtagctgcggctgctgtcaggacttcggcaaatttttacctggcggatttgcttgagcttcgtcaggatcttcatgtggcgcgagtaccgctcaggcatcaggtcgacgggagcgaggcgagagagtcctcccacaaccatcttcgaggacagggggtcctgggtaatgaccaacgactgttgctggatgcccgtcatactttgttgtggtgatggtaaaaagagtcgactgtagtgcgcggtagcgagtaaatttaatagtgaaggctcccccagtcattgcattgcttcattgctgccagggattgaggaatcgttttgcggcgagcacgaatgtacctggaggtggccgtcgcgccaatcaacgcatcattccggtcttgcgtcggtaagagcgtcagaaatcccgccagaccaacccactactgtacagagcgcatactttttggtattttgcatatgcaggagagaacggctacctgtagttcgagcaagggcaattgtttcttcacgactgaagttgacgctagtggtaagctggattgatcgttgcatatgggtacactatggtatatccccctcagttcgaacctatttcactcccaaatacgggcgttgggcaggatactttttatcattttgcgaaaccaaaaaatctttcgccttcataaaccgttcaatcggttaaatggcatttacatgtaattgcctggtcgtgtttgtttcgtgtccggctcgacttccgtgacttcgctcactttacttcctgacattcgcttcgtgaggttgagaatgaccttcgtaacttgcattacatttccgctttgtctatttccctcttctttttatttatttactcgattgttgatttgacgcttatattccgtttccgctttatctacagttctacatgtaatctcgccaaggccgtctcgccgtagcaaccgctggtaaacagctatcgtcgacttttccgctctcataaacgagcttcttcaagatttatcttttggcgtcttggcttcgatatcacacatacatacacacataccctgtcaaacaaacttcgcggtgttccaggtcgtataggtctggaggcgattttaatctctaccaaatgcaaactcccatactattggactgaatcgagtcactaggttttaccgccacgcaattgaaaatggcgatccgatcgtcgtgtatcagctgatgctggtgcagacgagctcttcctcacagcatcgcttcaatcggcattagggtcctgagctcgctcaacccttttcgatgtcagcggtgcctagcagctaaatgactggcagcggcaccaacggagagccgtctgtctcctccccacctcggactgctgcagcctagtattcatctctgtcttcctggttacttcgctaggtgggtcgactttccagatctagagtatagtaggtagcattgatcataccctccaccgtgatcgtcctcttggaattcggcaagttgtggatggcagtgcgatagccgacggggtatcaaccgtccgatctccgaggaggctcagctgtcgtccatttagtggaagagcgagattctacggatatgcatcggactgctaacgttaggtacacgtacttcacgttgtacattatggcaggtgcaaggccaatcgacacaggagtgagcagcttgaattggtgtgctcaacgccaagttgcggtttctatgctaacgtttctaaaccttcttagaaacgacctttttaatccaataccactccaccaacaatttatctgcgttcatcaagtgtcacaatcccgaccattccacagctagaccccttccaacccaattcaacgcaaccaatctctttccacagggtcctcattcccacatccccgtttccgggctcatagaaatcccaaacctgtggcccaaaagcccagagacagacatcaagtgccgctcagctataccggcgtgctgctgtctgtagctcgtccacagcccctcttgcgtcccccgacgcaagccctccctctcctccgcccgcccatgtctccggcggcctcccccctcccgggcgtcatgacctgcagcagtctgcgcaccgccggctcgcacccgaccgccaccgccacgtccgccgtggccgccgcgtcccccgccgtgcgcgccgtcttctcgggcgccgtggcgggcgtcgtggccgactcggtcgtgcacccgctggaggtcatcaacctgcgcatgaagatccagcagcagcccagcgccaagtacagcggcatcctgcgctccgtgcgcacgatcctcaaggaggagggcgtgcgcggctacttcggcgggctcagcaccacgctgctggcctcgcccgtgtgtgccgcaatgtacttcggcacgtacgagacgatcaaggccacggcggcccccatggtgcccgaggagcagcgcggcgtcgtgtacttcctggcaggggcggccagcgaagccatcatctcggccatcagcgtgccgtccgaggtcatcaagtcgcggctgcagctggggcgcaacccgcgcaacgccagtggcggagtggtcaagtacacgcagaactacaggggcacagcccacgcggccaagtctatcttgaagtcggagggcgtgcggggactctactcgggctactcggcgtgtctgagcgtggacacgttcttctcggccttctccttcctgttctacgagacgctcaagcacaggtaccagcagcacttgctgtcgacggactcggacagacagctgaactcggccgagtcattggccgtgggcgctgtggccggcggaatgtcggcgttcctgaccaacccgctggacgtcatcacggtgcggctcatgacgcagggcaagaacaaaaagtacttcggactgcgggactgcttcgtcaagtcggtgaggaatgaaggcccgatggtgctgtggcgaggcgcgtcctgccgcatcgtgtccatcatgcccaccacgggcatctgcttcggcgtgtacgagacgatcaagcacacgttcttcaacggcgagctcgacgacttcgagctcgactgacacgagagggcacgtgtaaatatcgacttttaaactgtggagagggggcgtatataatagaaccaacgaataaacagcacgctgagcatgacaagatgacactggcaagatgctttagacgcttcggctgctgctggtcacaacgctgttggtctgttggaaggcaggctcgcagatctctaccgagccgctagcagtacctcaacacttcggtcgagctgcttcaaaacaaagcatgcaatttggtttctctaactcgcgtgggtcgcaagaagaggtctctgcgagattcgactacgaccaagaaggaaggagagccgaccagtatggagcacaactcgttcttgaatggactggtagcttcgtggcagcagccgttcgaagtgtctgcagagtgaagtcgtcgtgtcaattggtgttgatctgaacacggcgttggagtcggtggatgatagcgggtgatattcatgtaacgtttgcagcgtggctcgcacatggagttacgtggactcgggagggtcaggacgctgagatcagcacattttggtgctgaagattcggggcgagttgacgtacttgagtattgcagtggtggcacgaactggggcagctgaaagaattagaacgtcgtcagcctgaaatgtttcatcgtgacggctgtgaagttgacgtcgtgcagtggctgtgtgaggaatacggttgggacccaaatcggaagttgtttaagtggcttcgctcaccccgctctgtgtcgggaattggatacatgtgaatcgaagtgaaggctgtacgggtggcgcaaaaaccaaagtgacaaggagaccaccgaccagccgcgcaatggccctatcatcaccacgtcgacatcgtgttatctcttcactctcagctaccatgaaggttgacgacgacattcgtgcctgattcgctgagcttttggacccccgccttacgcatcaatcagccccaatgcattcagccgagtgagtggtggtgacgccttccgtgttgatattcttcatggtgaaaggtgactgcagaatacgtgtctagcttcttctttcaagacttgacgagcgtccgttgctgcgacctaagagctggatggttcatttctgtagctgcttgcttggcgcgaagtgaactacaggatgactctgttcaagatgaagcgctccaacgtagcggagactgtcgatcgcgtgtcttcaacctgcttgaaagaagcatatcacgagtatcaaaatgtgaaggctccgccgtctcctccaggcctagaggctggtgcactacgcgaaggcggggcgcctaatctattcactgagcagcatatcggtctcgtgttgcaatacgctgcggtcgggctcgtgtacggcacgctgccttccaccatctatccgttcatgcaggcgtaccttaacgctagtggggcgcaggtgctcactgcaagtacgctggttgtgctaccgtggagcttcaaggtgttctatggagctctatccgattgcttcccaatatgtggctaccgtcgccggccgtacatgatcatcgggtggacgatttgtgtggcgatgctactgacaatggggtgcattcgcgtgggcaaaccttacttctcggacccgtcagatcgcgacatctcccccagtgactacacacccgagatcgaggcgagattgaaccgtgacgcagcatcggaaggcggcatctacgtccttctcatgatgttcgctgcctttggatacgttctgtcggacgtgtgtgccgacggtgtcgtcgtggagctggcacagcgagagccgctagctgaacgagggcggacacagtcgactatctacgctacacggacgtttgcagctgcaatcggtcagatcttgactggcgttgccttcaatggtgaagagtacggaggatcgttcgacttctcgctttcgtttccgcaactgatgttgttgctagctgcctgcaccgcgccaatcctcccggttacgtggctgtacatcgaggagtctccgaagccgccagtgagcttctccaagtacgtgcgtgacttctggaaggcgatgaagactcgcgcggtgtaccaggtcgccttctactcgttcttcagcggcatcttcgccagcttctcgtacactgcggggtctccgatccagttgtacatggtgggggtcacgcccatcaacaacaccattagcgacatcatcggcagcgccgtgttcatgggcggcatcgtgctcacaggcaagtacggactggcgtggaactggcgcacgatgacggtgctaacgggtgtggcggtgattgctgtcgacgcggtgtgtacgttcctcaccgtgtggaatgttgtccgcaaccagtggttctggctagggctcccaattgcagtgaacgtccctgctggcatcaacttcctcatcgggacgtttgcgaccgtggagctggcgggtgaaggccacgaaggagccatgtacggtttgcttacgaccgtggcaaaccttgcgtcccccttcgcagccactctaacaaagaccgtcgacaacgccctgtgggatttgagcaacgagcgcgtcaaagttgatgactatgcggtgcgacgcgatatcacggaggcagtgttgctcatgtacggcatgtcggcattatcgtggctctttctgtttcttctaccgagacagaaacaagagacccaggagctgaagcgatcaggtggatcgagcgcacttcttggggcactgacggtgggctacttgtgttttgcattggtttggtctgttacgatgaacattctggggattgtgtcaagcacgagctgcctcgtggtcgctggtggtagcggatgctgatacggtagtgtgtcggtttgagagttgtcggtggtgcgtttgcgttctaatatgaataacttcacaaaatgaaatgaatttatgtgtggttgttctagtaaatgtacatggatacatgtagcagcgcgcgtcaccgcaagtggattgcggcgcctgggtcgcagtaaaaaagagcgcgtatcttgtacttaagtatgggagaatgttgaaactacaggtataatagaagcaggtttgacgatcaatcgaagcgcacttagcattagaacttgctgcgtggtgaagcgtacactgcataatgtatatgaacgctgaatactaaagtaacaaagcaactgcctccgccgccttgctttcgaacggccggggttgcaatactcaagaatgtcgaggggggaacagtaaaaggctggtggatttcttagcagccgctgccgccggcgatgatgaggcacgaggtgctgtcgaacatggccatgaagttggtcatgagcgaccagacgaaggcgaacgtgaggtaggcgaccgtgagcgcaccaaggatcttgctgctgccgcccgagcgcagcagctcctgcgtctcctccttctggcgaggcaggaagacgaggaagacccacgagaaggccgtcatggcgtacatgatgatgaccgcgtacgtgacgtccttccgaatggaggtgtcgtcggcctggatgcgctccgtggtgaggtcgaagggctggtcgatcacgagcgtcatggccgtggcgaagggcgaggacaggttggagaccatggtgatgagaccgtagacgacgccctcgttgcccacgcccgagagctcgacgatgacgaacgtggagatcatccagccgacaccgtacggcagctgcacggcgacggggagacccagccagaaccactggctacggaagacgtcccagaccgtgatgagggtgcagatgccgtccacgatcatgacgaagacgcccgtgaacatgatcatccagcgccagttccagtgcaggccccacttggacgtgaccatgatgccggccatgaagagcaggttgccgaagatgtcgctgagcgtgctgttgatgggggtaacacccaccatgtaggaggccacgggggagctggccgtgtacgagatgctggagaagaggccctggaagaagttgaagaacacgacctggtacatggcgcgcttctggatgagctcccacagctccttcatgtagttcttgaagttcacgcgcggctgcttctcctccttgatgaagaaccaggtcatggggatcacgggcgccgtgagcaccgccaggatgatcatgagctgagggaagttcagagagaagttgaagtcgccgccgtactcctcgccgttgaagcagaagcccgtaaggaactggccgatgatgacgaacaccgtgcgcaccacgtagatggccgactgcgtcttgccgcgcgtctccatcggctcgcgctgggcgaagtcgaccacgatgctgtcggcgcacacgtccgacaacacataaccgaccgcagcgaggaacatgagcagcacgtacttgcccgcctggtcggcggcgtcgtagttgatgcgcgcttcgatctcgggcgtgtagtctgccggcttgatgtcgcggtcggacgaaaccgtgtagtacgggtctcctgcgggcatgcaggccatgatcagcagcatcaccagacaaatgatccatccgatcaccatccacggcctgcggcggtatccccacagtggcacacagtcggacaaaatgccataaaagcacttgaagctccacggcagcaccagcagcgtcgacgccgtggtcacttgagttcccgaagcattcatgaactgctgtaggaacgggtagatcgtggccggaagcacgccgtagttcaagccaatggcagcgtactgcaccaggagaccgatgctgtccctgctcttgagatcgggggcgccaccctcacgcagcgcgccgccttcgatggcgttcgggtccggcgacttcacgggcgtgtaggcgccatcctcgagttccttgggctgcgaggtgccgctcacgaacgacaagcggccggggaggtcgcccttgctggggccgctcgggccgtggtgtgcggtcgccatctctctgttgcgcggcgagttcaagtgagctgcagagcagaagttccggaatgaagcgtgtggcgtgacctcccccgacaactgcagacagccaggcaaccaactgtttacactctcggtcacggcagcagctcagaagagactgccggcactgaggaaaccgtagcaacgcgctgcccgccgacacaggaaaaagtttgaagtaccgctggacccgccatttatgtgaacggcatggcggcaggcgtgcggatttgcacgcacaggcggggagtgccgtctccagtgatgaatggagacccgctactgtacactccacgacaaaaagatatggacaccgccaaaagtggctgtaacttcgtcaatttttatcgttttaaggtgcggtttggactagagttgcagaacacgctgataaagatctgcacgttgctaacacgcgcgcttttgcgcttcttcaggtagctcacatacaaatcactggttctgcccaggtgacaaaacttatggacagctaatccccatacaaatatattaaccaaaaacccttacaaatgatacgacttggactttgtatggggcgaccaaggcgccgtacagcgaagcgaggcacacaatgacgcgttggtacagggggcaacgggctcacaacgcgacctcttcatgtacatataaggtgtggcaaatgcccgtcaacagcgtggacctgcactgcaacgaggtgacgaccgtttaacgaactgtaaatcgccgattaaagttgattagaaaaactgatcgaggttagggtaacccgtttatgttaactggtactgtatagatatgtaagactttccaatattttggataagtatacaggaacctcgctctttatcgagcgagaacacacatgtatttacctaggtgagacctgaacatttgccacaagcactacatcaccagtccgcttctacaaacaagcagactcaccacataatggttgaattgggtatcaacctatcgatttaatattgacatcatttagccaaggctggcctttgtttcgtgggcatccgggcaaaacgcacataacctcgcggatcgtcaaagctctgctctcgcctggcctattatttgcagtgcgtagatactcaacaccattgtgttcacgccaggcaaagcttccttagcacgtttcgaaaaggtgcgtatattgaaacgtaacgttacgtaccgacgagttgtattattgtgtaaattgaaccgcaagagccgtgctgctcgtggacgaatgacgaaatataaagagattcatcgacatctacgtatcagacgccacggcaagacttccatcacttagcaacctttgccgccagcgataatgaggcacgacgtggactcgaacatggccatgatgttggtcatcagcgaccagacgaacgcgaacaagacgtagaaccccgtgataccacccaagatcttactgctaccccccgtgcgcaaaagttcctgcgtttcctccttttggcgaggcaggaacacaaggaacgaccacgagaagatcgtcatgccgtacatgatgagcaccgcgtaagtaaggtccgttcggatggagtcgtcgtcggcctggattcgagccgtcgtgaggttaaacggttggtcaatcacgagtgtcagagcctgagcgaacggagacgcgaggttgtcaaccatggtaatcagtccgtagatggctccttcattaccgactcccgacagctcgacgatgacaaagttgccgatcatccaaccgacaccgtaaggaagttggacagccatggggagaccgagccagaaccactggctgcggaacacattctagatcgtcaggaacgtagtaaacccgtccacaataatgacgaagatacccgtgaacaggatcatcttgcgccagctccattgcaggccccacttggatgtagccatgatgccagccatgaacaatacgttgctgaagatctcgctgatagtgttgttgatgggggtcacgcccaccatgtacgactgaacaggggagctggcggtgtaggagatgctagagaaaacgttctggaagaactggtagaagatgacttggtacacagcacgcttctggatgagcttccagagttcggtcatgtagagtttgaacggcactctcgcttgcttctcctctttgatgaaaaaccacgtaatgggaaggatcggcgccatgatcaccgccacgatgcacatcaactccgggaagttcaacgagatgctcaaatggctcacgctgggcgaaatccaccacgatactgtcggcgcacacgtccgccaggacgtatccaatggccgcgaagaacatgagcatgacgtatttgcccgcttggttgccggcgtcgtagttgatacgcgcttcgatctccggggtgatgtcagcggcagcaatgtcgcggtcggatggaaccgtgtagtatgggtctccagcaggggacgccgccatcacgataagcatggcaaggcacatgccccaaccgatgagcatccagatcttccgacggtagccgcagatcgggacacaatccgacaggatgccatagaagaccttgaagctccatggcaggatcaccagcgttgaagctgtggtcacttgggagcccgtggcgttcagacactgctgcaggaacgggtacacggtagcaggcagcagaccgtagttgatgccgacagctgcgtactggaacagcagaccgatgctgtctctgctggtgagactgggggctccaccctcacgcagagctcctccctcgagattcgctgggtcgggggtcttcatctgcgtgtagctaggagtgccgttgtctgggtccttggtttgtgaggttccgctcacgaaagacagccggaccggaatgtcgagcttgctgggaccagcaggcccgtgttgtgacgccatgcttggtatccaaaggcttgagcaatagaaggcaagatccggaatgaactggttgtggtttcaacaaattggtttctttgaagactctactgggataatctgactgggtaactctactcacggttccaaaagatgaactgccaaaggcgatgggggccatttgttcgcaacttgcggtaagataccctctctcagagagggtctcaccccatcgccgaccggaggggatctgtcgatttgcctcgttgcgatgagttctacaccagctggacaaggaatccgtgacgtcctgaaatcgcccactgacattcgttgcctcctccgtgataaacagcaacgagaggagcgctgcaaatgttgagcccggtgacagggagagctccctccgaggtctgcagtcgtccacaccggatgtgcgcgctagacagtgtgaacgggaagggagggtacgctcgaatgaggagatgatccacgaagcgcggccgcactggacagtacctccagccacgaccacgcgcactgcagcaacatcaacgcttgtgcagccaagttgtgctaaccaaccaatgtcagctgtacatgtacgtacagtgccacgggagcattctacttatcgtacagtactagtacatgtagacctgtcgtgagcttgaagcccatttttttcggcgaccgcctgattaaaattctgggtttaatcccttccacgtcatgttagtcgatgcgatcagcgtgaatgatttttgttgtgcgctatagctgaaaggttctttgtgcatgtatcgacggcgctgggcgagccctgggttgcgagactctcgccgccaatgtgtgcgtaagagcctcacgtttcgagcgtcacgcaatctactcaaaagtgctggagaggaaccgtattgtacagtacatgtatcacgcaagatccgttgacaagaactcgatctgattccaaacaatgaatattgaagcaacaaacctcgggcttctaacaaaaatactcactgaaattatcttcctcttactgtagttgtcctaatactctgcttcttagcagcccttgcctcctgcaataagtaggcacgacgtggactcgaacatggccatgatgttggtcatcagcgcccaaacagtagcgaacgagacgtaggcgaccgtgagcgcgccgaagagcttgctgctgccgccggtgcgcagcagctcctgggtctcggccttctgacgaggcaggaacacgaggaaagcccacgagaagatcgtcatgccgtacataatgagcaccgcgtacgtgagatccgtacggatggaagtatcgtcagcctggatacgagccgtcgtcaggttcagaggctggttaatgagcagcgtaatggcctgcgcgaacggagacgccaagttgccgaccattgtaaccagaccgtagatggctccttcgttgccgacaccagccagctcgacgatgacgaagttaccaatcatccagcccacaccgtatgggagcttcacggccagcggcagaccgagccagaaccactggctgcggaacacattccagatcgttaggagagttgtgatgctgtcggcaataatgacgaaaacgcccgtgaacaggatcatcttgcgccagctccagttgagaccccacttggacgtgaccatgattccagccatgaagagcacattggcgaagatctcactgatcgtgttgttgatgggggtcacgcccaccatgtacgacttgacgggcgagctggccgtgtacgagatgctggagaagacgttctggaagaactggtagaacacgacctggtacaccgcgcgcttctgcagcagcacccagaactcgctcatgtaattacggaacgagatccggggcttcttctcttccttcacgaggtaccacgtaatggggaggatcggcgctgtgatgaccgcgacgatggacatcagctcggggaggttcagcgagaagttgaagtcaccgccgtactcttcgccgttgaagcagaagccaaccagcaactggccgatgataacgaacaccgtgcgcaccgtgtagatagccgactgtgtcttaccacgctgctcgatgggctcacgctgggcgaagtccaccacaatactgtcggcgcacacgactgcgaggacatagccaaaggccgcgaagaacatgtacatgacgtatttgccggcctggttgccagcatcagcattgatacgagcttcgatctccggggtgatatcagcgatggcaatgtcgcggtcggacggaacggtgtagtacggctctccagcaggcgacatggccatcagcagcagcatggccagacaaatgacccagccgaccatcatccacgacttccggcggtatccgtagataggcacgcagtcggacaggacgccgtagaagaccttgaaactccacggcaggataaccagagtgttggccgtggttacttgggagcccgtggcgttcaggtactgctgcaggaatgggtagatcgtggcaggcagcagaccgtagttgataccaacggcgcagtactggaagagcaggccgagaccgtcctggctggtaaggctggggacctcaccctcacgcagagcaccaccctcgaggttgacgggatcattgatgtcatcgggagtcttcgccactgagtagtcgtggccattgttggccttggcttgcgaggcgccgcttacgtaggacagtcggatggggatgtcgaggttgctgggccgtgaggcgaccattctggtgttgcttgtgtagtggagagcaaattccggaatgaaagcagacggctggtggtggcagggtggtaacccgcaatactgtaccccaggaaaaaatatcttggggtctcctgtacttcagttcctgatctctttcccaccgccgactgaagcaccaagcgcgtgagatgtgtacacagagctttccgcgccgagccggtgctgagagtggtgacgtcctggaatcggaagcaggcattcgctcctttggctgtgaaaagttgtcggcgtcagagcattgcggatcgaccatgcgccaggcaggctgcctgaggcagcaccagccgcaatgttccttgctccggatatgagctctcgctaaaattcatgtggaagtttgtaaggagaaccagttttctgcgcgaggatagccgtttgtgcggattaattattcgagatgggtcgtcagccaatcgacgacctcaattgctgagcgtcacaagtgacgcttgcattgttcggattgattaagaagttaaactgcggaacagcaatctacggtacactcacggcagggcgatgctgtttgcattattggtcgtcactgtacacaacaagcgagttctgtgtcaagctaagatttaggcgccagtgcatgtataatgctggagtcgtttgccatgtttgaaggaatgtcttggctcacatcagtcgatattatccccatcgtggatgtgaatgaaattgctccgagtttggaatataaataccatggtacagaactccccagcttaccctcgcctgcataaagtctggtacctcgcacagatagtacaaatcactgttgtcgcacatccgtgcataaattcaccatatactgatttaactgaaaacgggagggaaagtgtcgagtgggggaagcttacacaatagcaatgttgtaataaatcagtatgtttagcctccttttcaattctcttaaccttgcaagatttattggtcccacctttttggctaaggcgggagttctgtacagtgtactgtacggtacacatataattctccggattttatccagagttgttagggcgatacgactgcaggtgcaaatcattataaaaatgcatgctccgctatcggttataaacgaacggatcattaacgtatcggaacgtacccgttaaatttaataaacgcttggaaatatattatccagcggcgtgttgcttgagtcttttagggccgacattcgcgtgacacgatcgatcggatgtcgctcgaccatgactccaaacataactacagttgagtttgcagtacatgtatgttcaacgatgttacatcggtgtcgccacgttcaagtcatggaacgacacccacgaacacccacgacttcaatttaaagtcgtgggtgtcgttgaagtcttcaaacgatgctggtctcgtttcaaccattctgcacgtgcacacgtaccgttaccgccgcattcaagccctgcatattattgcaagatagctaaggcatagcgagtgaccagtacatgctcgcgtaagggcttgagatagttggcagtatggtttcggaacttggtagcaaacccgaataaagacaaaagcaccaactgctgaaatttaaggatacttcgctctaaccaaagaacctcgggtagaactgctaggcacatttaagatacattaacttagaatcaaacctagaatcgaaactacatgataaaatccagagcttctccgtgctatagcacggcttagtaacgacaaagtgtattatacgtatgcttttctcggggacactcacattacgcataactgtaagcttacaatttcattttcaggatctgaagttagcgcaagtgcaccaccgacaaagctgtcaaagtgcaactctcaaaccaatgcaaaacacaagtagcccacagtcagtgccccaagacgtgcactcgatccacctgatcgcttcagctcctggatctcttgtttctgtctcggtagaagaaacagaaagagccacgataatgccgacatgccgtacatgagcaacactgcctccgtgatatcgcgtcgcaccgcatagtcatcaactttgacgcgctcgttgctcaaatcccacagggcgttgtcgacggtctttgttagagtggctgcgaatggggacgcaaggtttgccacggtcgtaagcaaaccgtacatggctccttcgtggccttcacccgccagctccacggtcgcaaacgtcccgatgaggaagttgatgccagcagggacgttgttgtggtttagaataagtaccaacttttgacataccgatcggagtttctaatctcggatagaaacagatgcatgaagtacaagaacttgattttcgtatctgtataataaggataagtgagtttactgagctccaccagtttgctagggctgtaggaaaagagaacccaaccggatgaagaactggagtcggccccactttcaaattggccctccgtctgacggtcaactacaactacaactacaactacacctaccggctcaagacaacaacatttcagatactcagatgagtgtcttgaccaagcgagagaagaccgtgcctggcggactggagaaattctccggaaagcaccacgagtatgctacttggaaagacaagctactcacgcacgtggcccaattggacttggaggccgagaacaagttactcgaagccggcgatccggacccgaaggtctgcatgagggacttcttggagtccaccttacggatgcagacgtgaaagcagctccgcccgaaggacaattggctgtccggaaggagatcatggtatggcgcaaggcggacgcagccatgaggcatgtcctcaactcgaccctcccaaactcgtttctctcgtccctaccggacgaggtgcgaaacatggaggtgtgtcttatttggcagcatctcgaacggaagtttgcgtttggtgatgctggaggattggtggcgtggtcgaatcggtggactcagattctgaactcgaattggaaagacaccatggccctgttctcgctgttcaaccaagcgcagaacgagatgaatcggaagtctaagaagctactcggcaaggagatgatgacggagacgatgctgtgcgtgcaagtgttggcgcagctcccaagcgagatttgggcatcttcgattgagctcacggaggaagcgttcaccgccgaaaaggtcgaggcggcgctgaacaagttgtttggtggccgatcccggaagcagatcacgggaaatggcgatgcgacaacggtggcgcgcataaaccatgtcaagagtgagcgtgctgtgcgtggatacgacactaagaagcgcaagtcggatgccaacaccaaggttcaggaccaagggtgtttctactgttcggccaaggacaccagaaggcgcaatgcgagcgcatgaaggccgaccgcgacccaaaccgtgaagggggaccgcttttccgcaccaacgtgcaagcctaactttccaagcgggcgcccaacggaactaagaagattgccacggtgcagcacgttgcaaagaaacaaaggacgaagcgtgacgcacccacggacgtcgagatggaagaagagttcaagctacctgaatcggaaaatgccggatcggaagacgagaatggaggctgtctgctgagtttcggtcaaatcgacaccagggtacgtaagaagtatgttgcttacttaaattggctacggcgattaacagtttcggatgatctgtggattgttgatacaggaggtggactagggataagcccggacaggagctggttcgaatctgtccacacaggttcgagtcaccagtttgagtatggaaacggtagcacgtcgaagactgctttaacgggttcaatacagatgcatattgcaagtcctttcagtaagtctatcggtttaaagataaggaacattgctctcgataaggaatgtgggagtaatttaattagcgcttgtcatctagccagacaaggttacaatcacgttcaatcccgagatggggagttttgtattttttcagtgagaaagggcagcttttatttgcagccgttcaaaagggagcagtatattatctgccttcatctaagtacagcaaagttaatgcagtaagaaaaagttatacacaagctcagaaaatagctttgctggagaagtggcatcatagattaggccacgttcacaaggccagacttttggcaatatttagcaatggattagttgaaggaattcctcaaattcctcaaaaggaactaaaggatcatcctttcttttgcgctacgtgtgaaatcgcaaattccatgcgaatgtcatatcgtaataaaataggctcaagaagtaggcaaccattgcatactttacatatggacacctcaggaaagataaaagtgaatggaagatatggtggttttggttaccgctacgcattgtcaattgtagatgatgcaacatcctataagtgggtgtttgtcatgaaatcgccaaaagaagtgtatggtcacgttgtgaatctcgtacgtcaattggaaaaacaatatccgtatgagataaaaagaattcgcagtgacggtggcaaagaatttgtaaataaaagagttaaggcgtttgcaaaatctaacggcaggctatttgagaaatctaatgtagactctcaggaagaaaatggaagtgcagaacgttgtcaccagacgttaatgaaacaagttaggagtgcactattagcggcagcaatgccagcaagttggtggcctgaagccattaagtacgcagcgaaagaatcaaatagacttccaacatctagacttggccacacatcgccatatgaggccctaaataagaaaaagccggatgggaacattttgcaaatttggggtagtgtttgctatgctcacattccgagtaccaaaagaaaagataagcaattaagttcacgaggactagaatgcaaatttcttggaattgcagaagactataagggttgtaggctgttagatgcagctaataatgttttactgatcgctagaagcgtaagattcgatacaaccgaccaattagcaattatgagaaggtcgtttcctaagcgggataaacaattaaccccgaacgaagtagaggaaattgttgagtgtaccaccaacaacatagaggaagaagacgaagaattagaatcagaagaagaggaaaaggaagaagaaaagacgtctaaatcaccccagtcaggaagtgtgggagatgtggtagatattatttctccttgtgacgtaaatgagtcaaatgttagtcacaatgtaccttccacacttggtctaaatagtccaccaactttggtcggactgagggaggacaaaacggaaacagaaagtgcaaagcagcataagttgccgcgcacactacgtaaaagacggcggagcccaaggctcagtgggtatgaggttaatataaacccaattttaggcgtaaaagttagtaggacacgcattcctattcctaagtcactaaaagcagctatatcagggccttatagggagaagtggctgggggcattagaagttgagcataatgctctaattgcaaataatacctggaaaatggttgacttgccaaaaggacgaaaggcattaagctgtcattgggtcctggatgtaatataatgcagatggatcagttgaaagattcaaagcccgattagttgtaagagggaatcatcagacacatggaatagattacggtgaaatattttcacccgtcgctcgctatgagtcactgagattagtgcttgcaattgcagcaattagaccagatattgcgaacgctgtaagagaattaagtaaatttctctcttgttataataagtcacatcggaaagcagcccagcgagtacttaagtatctgaaaggaacatcgatgtatgggttagtatatgagggtactacaaagaagtaacgtatgagctatacacagatgcgagcttcgcaaatgctaatgaggaccgtaaatcagttacaggttacgtgtcaatactcgcggatgcgtgtgtatcatggaagagttgtagtcagtttacatacagcacaagctgagttagtcgccgtaagtgagggtgttaaggaaagtgagtggctctggttattgcttaaagagttaggatggcagcagaagcagccgatatattgttggtgcgataacacagcagctataagtattgttacgaatcctggaaaccattcctcgacaaaacacatagagactcaatatttgtacgcccgagaagcttatgaaagaaagcgcatcgatatcacgtactgcaatacaaaagatatggcggcggatgcccttacaaaggcactcccagaagaacaattttgcaagctacgtgagcttatgggtgtgagaaacttagaagttgaaaaaaacaatgagagtgcgtagtaaccttaagggatatttatgcacaggcagtaatcataacgtggcacaaaaatacactgagttaactatcaagtttgatttgcatcaagttaccgatcttaagataagtagaacaagtacaaccgtcagagtggagttaagttttgcacccctaaatgcattattaagtttcaaggggtaaaattaaatgagaagcaacttcaaggtctaagttataaaactgtcaaagcatattggcgtttatgtaagtttgttgaagttatgccaaggacaaagtcaaattttggtgaaaaggataggcttttccaatttgctccccacaatgcgcattgtaagacacaaagctgtaggtctgggtatatgcccctaagacgcatacttaaaggtcttataacgcacatttgccaggaatggtgccaaggttagataagtggcgacgtatcggttgcgtgtctctttagtgggagtgttgtggtttagaataagtaccaacttttgacataccgatcggagtttctaatctcggatagaaatagatgcatgaagtacaagaacttgattttcgtaactgtataataaggataagtgagtttactgagctccaccagtttactagggctgtagggaaagagaacccaaccggatgaagaactggagtcggccccactttcaaattggccctccgtctgacggtcaactacaactacaactacacctaccggctcaagacaacaacagacgttcactgcaattgggagccctagccagaaccactggctgcgggcaacattccacacggtgaggaacgtacacaccgcgtcgacagcaatcaccgccacacccgttagcaccgtcatcgtgcgccagttccacgccagtccgtacttgcctgtgagcacgatgccgcccatgaacacggcgctgccgatgatgtcgctaatggtgttgttgatgggcgtgacccccaccatgtacaactggatcggagaccccgcagtgtacgagaagctggcgaagatgccgctaaagaacgagtagaaggcgacctggtacaccgcgcgagtcttcatcgccttccagaagtcacgcacgtacttggagaagctcactggcggcttcggagactcctcgatgtacagccacgtaaccgggaggattggcgtggtgcaggcagctagcaacaacatcagttgcggaaacgaaagcgagaagtcgaacgatcctccgtactcttcaccattgaaggcaacgccagtcaagatctgaccgattgcagcagcaaacgtccgtgtagcgtagatagtcgactgtgtccgccctcgttcagctagcggctctcgctgtgccagctccacgacgacaccgtcggcacgcacacatccgacagaatacctacgaagtcagagcaacggagagccgtggtagaacgtaaagaagtcgttggtatgttggaatgtaaaagcgaacgaatagtggtaactaagaaaagaatcaataacttctcatatcactccactcactcacgctgccttggaatagcgacagcggacgttcatcaatgggggagaccaggtccaaaagaggacacagcactgcaaccaccgacatcccgagtcaatgaatgaagtcgaatacgatcatcaaagttattgaggttgtctacttggaaagtcaagtagaaaagaaggtactatagaaatgatcctgtgtaagtacggtcttgaacttccattgaaaaagttgccgtagtttatgtgctacaatccaaccatacgctcaagtctgaccttctgtcatcgatatcattggtggaatcacttcaacatggacgacaacaacaagaagaacgcaacaaagcaaaggtttctgttcataaagcgaagactactccattgataacattgctctcttagcagccagtgccccccgcaatgacgaggcacgccgtgctctcaaagatagccatgatgttggtcatgacggaccacacgatcgcgaagctcaggtaggcgaccgtgacgccgccgatgagcttgctgtgaccgcccttgcggagcagtcgttgcgtgtcctccttttgcttgggcagcaggggcaggaagacccacgcaaagatggtcatggcatacatgatgatgatggtataggtgagatccatgcgaatcgagtggtcgtcctgttggatccgcttgttcgtgatgttgaacggggcattgatcacgagcgtcaacgctgaaccaaagggcgcggcgacgttggtcaccgtcgtcaggaggccgtagacggccgcttcgttgcccagtccggccagttccacagtcacgaaagtcgagatgatccagccgacgccgtacgggagctggacggcaatgggagggccaagccagaaccactggttgcggaagatgtcccagatgacgatcatggttattgtacagtccacgacgatcaccacagctccagtgacgacgatcatccagcgccagttccagtgcagcccccatttcgaggtaaccatgatgccgatcatgaagagcaggttgctgaggatgttactgatggtgttgttgatgggagtgacgcccaccatgtacttctggactggggagctgccggtgtacgtgatgtcggcgaagatgtgcgagaagaagttgtacgcgatgacctggtacaccgcgcgactgcagagcaagtcccagaagctgctgatgtactctttgaagttggcggcctctctcttctcctccttgatgtagtaccacgtcgtcgggaacacaggaagcatcagcacggccacgatgatcatgagctgcgggaagctcagcgagaagttgaagtcaccgccgtactcttttccattgaaaaagaaaccagtaaggaactggcccacgatcaccatgaccgttcgcacggcgtagatgcacgactgcgtcttgccacgcttttcgagaggttcacgctgggccagctccaccgtgatactgtcagcgctcacgtccgccatgacgtagccaaacgccgcgaagaacatgagcatcacgtacttggcgccttccgatggagcgtcgtagttgatgcgcgcttcgagctctggcgtgtagtcggcgatgtcgacctctctgtcatccacatttgtgaagtatggcttgccaatgggcatgatgcacatgaccagcagcatggcgaagcaaatgccccaaccgatcatcatgtacggtcgacggcggtagccgcagatcgggcgacagtcggtcaggatgccgtagaagaccttgaagctccacggcagcaccacaagctgactcgcagcagtcacttgagcgccggaacagttgaggtactcctgcatgaacgggtagatcgtctccggcagcagtccgtacacgagtccaacagcggcgtactcgaacagcagtccgaggttctccttgctcgtcaacacgggcatgccgccttcacgtatggcgccgtcttctcctccgggagggagcgcaccgatgggtacacgctcgggggtcttggcgccgacatagctgccgtcctcgatgtcctttggttgcgaggtgccactcacgaacgacaggcgcttggggatgtcgaggtcttggttattgatgccgtgacctccggcgaacgtggttggcatgacgaacgaggggccttgagcctacggtagtcgagctcgttgaggggggggggggctgcggggttgagaggaagttggcaagtgagtagggaatgccggcgctaccaaacgaggccagaccatcagatggagagggtacccccatgcaaagccacaagctacgtttgatgcccaagccgtggggcaagaggaggatgagacggctttcgtctccattccaaacggccccttgttcagccaaacggtcaaagagtggtcatgtgtaggtcacatgacacccagaaagcatcactgaaggaaactgtcgacgaaagctttctcaaacagcaaaaaaacgatcattgtaagtacatgtacctcaacacaagacttccttcaatacgcgtccagcaagctcaacctggatacggggcatagattcgaatatcgacatgcgctctcaagttagttaacgctgaggttagaacggttcgcctgcggtacgatgcgaggggggggcttttctggggtgtgtagacgcatgcaagacctgcagcaggtcacgcatctcgtgtcatcccaactgagttgaaggtatcatattgcttgcaaatcaaaccccgacgtgagcctcgcagtcatcgcggtacgtattcgacgtggagagatcattgcagctgattgaagcgttttatcgtacggggccgcgcttggttatcactgctctgacgtggttcgtacagcactgtacgacgtagcttactgccaggcgtggcagaactggcaggtgtatgtacacctctcgttgccgccactcacagccaaactaagcggtgcggccagcgaacgattcacacttggcggagatgacttcgcccaactgcctcgctagatactgtaccactcattgcgtcatatattggagctatgggcgcatatgaacgaggccgcaaaggctcggacaaatgatggagtacatgtatgtaccataagcagggacgcattaggccaagtcttccttgacattgccatgttcttggtcgcgagtttcttcctctttcaagctaaatctgccttcttcttcagaaggaggaagcgccagccattgctaccgagatggagggatttctgctgccccacggataatctcaatctgtatcggtagtgttattttaataatttattattattgaaatacatgtgtatccacattgggtcgtcatgttttacgttaccaccacagtctgaaacatgaaatgcttgaactgcatgtacacaccgagtctacgtgagcgacatatctttcttccactcaactaccggcaggctcctcacttagcaaccagtaccaccggcaatcatcaggcacgacgtgctgtcgaacatggccatgatgttggtcataatagaccaaatgatggcaaagaccaagtagaacgccgtgatgccgccgatgagcttgctgtgtccacccttgcgcaccagttcctgcgtctccgtcttctgcggaggcagcaggaacaggaagacccacgagaagatcgtcatggcgtacatgatgatgattgtgtacgtgatgtcggcacggaccgagtggtcgtccgtctgcacacgctcattggtgatgttaaaggggccgtcgatagcgagggtcagcgacgacgcaaaaggcatggccacgttagtgaccgtcgtgactagaccgtagaccgcagcctcgttgccgacctgcgccagctcgaccacgcagaacgtggagatgatccacccgacgccgtacgggagctgcactgcaataggagggcccagccagaaccactggttacggaagacgtcccagataaccaagagcgagacggtgcagtccacgacgatcaccgctgtgccggttgcaatcgtcatccagcgccagttccagtgcagcccccacttggacgtgaccatgataccggccatgaagagcaggttaccgaggatgtcgctcaccgtgctgttgatcggggtgacgccaaccatctttgacgataccggagagccggcagtgtaactaataccgccgaatatacccgcgaaaaagaggtaggcaacaatttggtacatggcacgcgagcacaacaggtcccaaaagttggacatgtactcccggaagttggcagcactcgacttctcctcgttgatgaagaaccacgtcatggggaacaccggaacagtaagcactgcaacaatgatcatcaactgagggaagctcaaagagaagtcgaagtcgccgccgtactcctcgccgttgaagaagaaaccggtgagcagctggccgaagatgaccatggccgttcggaccgtgtagatgcacgactgcgtcttgccccgcttgtcaatcggctcgcgttgggccagctcgcacgtgatactgtcggcggagacgtcggacataacgtaaccaacagcagcgagcatcatgatgatgacgtacttggctccttggtcgggggcgttgcggttgatgcgggcctcgatctccggtgtgtagtcagcgatgtcgatgtcgcggtccgcagccacagtgaagtacgggtgaccgataggtaaagtagccaaaatcacgagcatgatgaagcaaatgctccaaccgaggagcatgtacgggcggcggcggtagccgaaaatgggtcggcagtcggacaaaatgccgtaaaagaccttgaaactccagggcagcaccacgagctgacttgcagcagtcacttgggcaccggaacagttgaggtagttctgcatgaacgggtaaatggtcgcgggtagaagaccgtacacgagtccgatggtcgagtactggaacaggagaccgatgttttccttgctcgtgagcaccggcatgccaccttcacgcagcgcgccgccttcaatgtcgccgggtgtcttggaaggggcatagccgtcatcgacgtttttgccctgcgaggcgccactcaccagggacaaccgcttggggaaatcgacgtcgttgagacttggaccaactgtcattgtgcccacagcgagagacttgagtggaccgagggaattgaggactggcagacacgaggcgccccgctcggacgataaagcgggactcgcgaacgcatgacggttggaaccggctcaactcaagtttaccctcgacagagtcaacatttaggattacagtgcgagctttgccaggatgctgctgcattttggtgggtcctccgatgctgctggtgttgactcatgcagcgacagccaagcttttcgccaaataggctctgcttcttgcgggtggacggatagagaccagcatttgccacgtcgtagctttacgaacacaccaaaaagcggttccggctgaccgactcgctacagtaccagtactgtacacgggaagcacacgtacagtattgatggcgaggccatctgtactggcctgtgacataccggtattcgatgaatcgatgagcaagcggatgcgtggcgaattgcgttagcaccacgcaagtgcaaggatcatcacatgagcaagaatggtaaacgctcagttgactgaacttctcgcttacgatttggttatgctagaataatgcgcgctacaagagcaatgttagagagctgtctttgataggcttcagcaacccaagattcgtaatagatagattatattatcaaatgataaggattcctaccgaggagccgtctgcactacaaaggcttgagagtttctcagtacagtgtttttgtttacttcggccaggacaggtccaacatgtaaaattatgctgtgattcatgctatcctagtcctccatcatacttttagagcggtaagaaaaaataacggcgaaaatacagactcggttccgcaataggattttgggtacgatcccagtaatgtgaagacccaatattatcgatccgcaaatattgcaaataattcaatatcaatacttcaaatcatatatcaccacaattgtatgttagaataaaatacttcgaagggcaattattggtacttccactgaaaaatacatgtgaatgagatgacaacaatgcgaaataaggttgaaaaaactaaaatccttgggaattttagaacgaacaacgtgatccgaatagtaacaacggatgggaacgcgctttagcagccagtgccgccggcaatgatcagacacgacgtgctgtcgacatggccatgatgctggtcataatagaccaaatgatggcgaataccagataaaacaccgtagcaccgccgatgatcttgctgtgaccacccttgcgcaccagctcctgcgtctccgccttctgcggaggcagcaggaacaggaagacccacgagaagatcgtcatggagtacatggtgtacgtgatgtcgctacggacggagtgagtgtctgcttgcacgcgctcgttggaaacatcgaaggggccatcaattgcgagtgtgattgacgtggcaaaaggctgcgcaacgttcgagacagtggtgactagactgtagaccgcagcctcgttgccgacctgcgccagctcgaccagggcactgtggttgatgcgggcctcgatctccggcgtgtagtcggcaactttgatatcgcggtccgatgatacggtgaagtatggtttgccgatgggcatgatggccatgatcagcagcatgatgaagcagataccccagccgatgagcatgtacggacgccgacgatagccgaaatgggtcgacagtcggacaggatgccgtaaaagaccttgaaactccacggaagcaccaccaactgcttggcagcagtgacttgagacccggagcagttgaggtagttctgcatgaacgggtagatcgtttcaggtaacaggccatacacgaggccgacggtggcgtactggaagaggaggccgaggttgtctctgcattcctccttcgcgaatggctccgccttcgatctcgggggtcttgacagccatgtagccgtcctcgatgcccttcgtctgcgagccggcgctcacgaacgacaagcgcttggggacatcgacgtcggcagtggccacaggcatggcgactggcgatggattggctgcagttgttgttggttgcgacttgagcggggcgccgagaattggagactgaggtcttgcgaagctgagcgcggcgcaacaaatctgactcaaggctccactggcgcaaggcgcattgtagacggaactgagcatgatgacggcaagtcctcaaaaaagctccaggacggcgtcgattacagcatccccagggtacagccggccatcacctcggaggcaccatcaagacagcacaccgcacaaaaaccggatcaatttgccgttcgatctccttgggccttcagcttttggtctcagcttgagacgagcgcttctacaggatacagctgagtgcttgcacatctaccatagatctgtacccgccaaagcaaaacagcgattccgtcggaacgtccatgaggaaaatctttgctctctgttcccaaggctggtggctacttcagtatttattccctacgaactgccttttgtgccaatggcgactagcgatgtaatgctaagttcgtccgtaccgcgcgcgcgagagagaaaaggaagtctctttagccttggtcattcaaaccggcaccgcgagcgatcacaacgcaaggcatgatggactgcaccaattgtaccaaagaagaaagccgacgaataattgcgtaatgatatcgcccaggaatgttgctgcgacatcgagttcatgcgtgtccgtggagagtcttcaatgaagacccacaaaaccatcgtcatgtcacagagtggtcgtccaagcttgagcggaccgtcgatcagcaacgtcgaggtggtcgcgaacgcgagatgtactgatcgagccgtatgcacgtagtgctactcgcgcggctgcttgacaaagttcaaacgttctcgcatattcactaggttattgaaagcatcggcatcgccaaaatctgcctgatgacccgtgtacatgtacgcggtaaacacagtagcttgcagttgatctcggcaggatgcgagcttcactttgttcacaacgaaaataatcacttcaacttgaagtgaagtcaacatggcaagtgtatctactttgctcgaccagcaatccccgcaacgagatcagcgagcaaatggagtgcccgtgcgaatctttcatgcgcgcatcatgacgagccacgggtcagcatcaacgaaagcacacggcaatgtggaggacacggaggattcagctaacagagcgcaatcggccgactaacgttcaacgcacaagaacttccagaggattatcaacacgttttttcatcaccgagacgataaaacatttgtgtccggccacgacgcggtcgactgcagcgcagtgcagtcgagccacgccccaccggttcggctatttcgtttagcagccggttccgccagcgatgatcaggcacgaggtgctgtcgaagatggccatgatgttggtcatgatggaccagatgatggcgaagatgaggtaggcaaccgtgacgccgccgatgagcttgctgtggccgcccttgcggagcagctcctgcgtctcctccttctgccggggcagccagtacaggaagacccacgagaaggccatggccacgtacatgatgatgatcgtgtacgtgatgtccatgcggaccgagtggtcatccagcttgatgcgctcgttggtgatgtcgaactggccgtcgatggcgagcgtcagcgacgtggcgaacggctgcgccacgttcgagacggtcgtgatgagaccgtagacggcggcctcgttgcccatgccagccagctccacgaccacgtaggtcgagatgatccagcccacgccgtacgggagctggacggcgatcggagggcccagccagaaccactggttgcggaacacgtcccagataaccaagagcgagactgtgcagtccacgacgatcaccacaattcccgtggcaacggtcatccagcgccaattccagtgcagaccccacttggacgtgatcatgataccggccatgaagagcaggttgctgaggatgtcactgacggtgctgttgatgggggtgacgcccaccatgacggaagcaaccggggagctggccgtgtacgtgaaggtggcgaagatgccggcgaagaagttgtaggcaatcacttggtacatggcgcgcgagcagatcaggtcccagaagtcgctgatgtactggcggaagttggccggctccgacttgtcctccttgatgtagtaccaggtcaccggcagcaccggcagcgatagcaccgtcacgatgatcatgagctgcgggaagctcagcgagaagtcgaagtcgccgccgtagtcctcaccgttgaagaagaaaccggtcagcagctgtccgaagatgacgagaaccgtacgcacgacgtagatggccgactgcgtcttgccgcgcttggcaataggctcctgctgggccagctcgcacgtgatactgtcggcgcagacgtccgagagcacgtagccgcaagccgagaagaacatgatgatgacgtacttggcaccctgcgacggcgcgtcgtagttgatgcggttcttgatctcgtccgtgtagtcggccaccgcgatgtcacggtccgaggcgacggtgtagtagggcttgccaatgggcatgatggccatgatcagcagcgtcacgatgctcatgatccagccgatgagcatgtacgggcggcgacggtagccgaaaatcggccggcagtccgacatcatgccgtagaagaccttgaaactccagggcagcaccacgagctgcttggcggcagcgatctgcgagcccgagcagttgaggtactgctgcatgaacgggtagatcgtggccggcagcacgccgtacacaaggccgacaacggcgtactggaagaccagaccgatgttctccttgctcgtgagcaccggcatgccgccggggcgcagcgcaccgccctcgtactcgccgaccttctcgccggccttctcgccggtcgtgtcgggggtcttgatgccggtgtagccgccctcctcgatgtccttggccttggacgtggcactgctgatcgacaagcgagcgacgagctccatgtcgttggtgccgttgagcggcatgcttgctctcgttgcaactagggacgcggggaactaaccgtccgggggtcttgcgcggaagcaggcgaattgcagagtggctgactgaccgcgtgcggtgcagcgagggagggattaaacccgttaaagccacgggctgcagcctgctcctgcagactgcaggagcacgctgcagtgcaggagcacgcaatggacgtcgttgggtcacgcggtccgcaaagcggatgaagaaccagccgacgctaggaaccatgatgggcactcgccagcgccgtctcctgttgccgaatttctgtgtcggggcgccactgcaacgcgatgacaggtacagacaacgacttacaaagccggctgcttgcttaatgccatcctcctatataaaaacaacgataaccgtcaaatctgtaaaactgtcataaaacacacggcgtgatgcataaagtacacaagaaagcatataaagtacacaaaaccagatggtatacaaagatgaagtcatttgattgaatctgattggctggtttgctcatgttaagctttgcttgacttcgtctgccggctttttgtgtctgccggctttgtaagtcgttgtctgtaaccagagccgagccggcggtacagcggacgggtgccggcggccgcgctcattgcggagaccgtgcagtaatggttttacgcaaatgttattactactattttatagatcaagagttagactatttttaacggtgataatgatgtggccccacagaaaacacttgtttccaacctggcccactttcatgccgttcacaacgcgatctgcctccactagagcaagtcaagtcccacccggccaacctccaccgcaaccatgaagtttagcacgttcctcgttgccgcacttgccgtcgtcggtattgtcgccgccgccgaccaacctgctgccggtacgctgccggccgtcactatgtacttatcagaattagcatttggtctaagggtataaactgaaattaatactactgctacatggtagtagtatttagatttaaaaaaaactggttagaaaaatgatcaagttcatctactttactaaatactatactaatacccatacagaactcccctgcttaccctcgcctgcacaaagtttggtacctcgcacagatagtacaaatcactgttgtcagcatccatgcacatccgtgcataaattcaccatatactgatttaactgaaaacgggagggaaagtgtcgagtgcgggaagcttacacaatagctatgcgccgcaatgttgtaataaatcagtttgtttagcctcctttgcaattctcttaaccttgcaagatttattggtcccaactttttggctaaggcggtgagttctgtatttatttagtacagtatccagtaaattactattgcccaaaacgaccggagaccttgggtcctgtctctgcggggtgaagcgcgtgtgcaatgcggggcaggttcgtccagtctccagccgttccctccaaaaatgcccgcgatttgcgcaaccttgtgagaagcaacaccattagcgtacatacctacaccaacgtgttgaccacgcggcttgatgaagatagatacactgtactctatggatcgacaacaacaaaccaaccaagaaacaacggagtgtattgatgtgtacatacatacatacagctttcgatatgacggagttccgctcaccctgcgggcgtaactgcatcgttgcgatgtgctgtgggcttgagcctgccgagttagcagccagtgccgccagcaatgatcaagcacgacgtactgtcgaaaatggcgaggacgttggtaacaacggaccaaaggatcgcaaagaccaggtagccgaccgtgatgccgccgatgagcttgctcgagccgcccttgcgaagcagccgctgcgcgtcctccttctgcttgggcagcaggaacaggaagacccaggcgaacaccatggcggcgtacatgatgatgatcgtgtacgtgatgtccatgcggacgctgtggtcgtcctcctgcacgcgcgcgttggtgatgttgaacgggccgtcgaccagcaacgacagcgacgtcgcgaacggcgcagcgacgttggtgactgtggtgatcaggccgtagacggccgcttcattgcccaattgtgcgagctcgaccgtgacaaaggtggaaatgatccagcccacgccgtacgggagctgcacgacgataggggggcccagccagaaccactggttgcggaagacgtcccaaacgacgatcatagccaccgcacagtccatcacaatgacagtcgcggcagtgcacatgatcatccagcgccagttccagtgcaggccccacttggacgtgatcatgatgccgagcatgaagagcaggttgctcagaatgtcgctcacagtgctgttgatcggggtcacgtccaccatgtaagacgcgacgggagtgctggccgtgtaggtaaagtcggcgaagatgttggcgaagaagttgtacgcgataacttgatacacggcgcgatggcacagcagatcccagaagctgctaatgtactccttgaagttggccgcctctaccttgtcttccttgatgaagaaccaggtcatgggaagcacgggcagggacagcaccgtcacgatgatcatcaactgaggaaagctcagcgaaaagtcgaaggtgccgccgtactcctcgccgttgaagaagaatccggtcagcagctcgccgaagatcaccatggccgttcggaccgtgtagatgcacgactgcgtcttgccacgcttggcgatcggctcgcgttgggccaactcgacggtgatactgtcagcgcacacgtccgacatgacgtagccgaacgcggcgaagaacatgatgatgacatacttggcgccttccgacggagcgtcgtagttgatgcgcgcttcgatctcgggcgtgtactccgacaccttgagatcgcgatccgaagataccgtgaagtagggcttgccaactggcatgatagccatgaccagcagcattatgatacagatcgtccagccgatgagcatgtacggccgacgacggtagccgaagatcggccggcagtcggacaggatgccgtagaacaccttgaaactccagggcagcacgaccaactgcttggccgcagcgacctgcgagccggagcagttgaggtactcctgcatgaacgggtagatggtctcggggagcagaccgtaaacgaggccaaccgtggcgtactcgaacaacaggccgaggttctccttgctggtgagcaccggcatgcctccaggacgcagcgcgccaccttcatactcgccgaccttctcgccggaggtgtcgggggtcttgacgcccgtgtagctgccttcttcgaggtccttggactgcgacgtagcgctcacgtacgacaagcgcttggggatgtccaggtcgcccactgcggggcccgtgccgcccgtggtggagacgcccggcatggtcgatcgatcagcagcgagtccttgagctgtcttggagccgagctggcaaatcggggaatgacaggagcggccgtgtgagtggcaaaactcgtctacaggggggaggcactgcactgacacgcacgatatcccttaggactcctcaaaagagggtcagtcaagcaagcggtgacttcaggtacagggagatgagctttttcgtctgtaggtctgtgctgctggccgctctcaccggctgaagttggccggactcacgctgagttgcggctcataaagcgggcaagtcgcgcgttctttttcttgtacctccggtcgagtgaccgccatgttgggtcaaccaacacccagcctgggtaatcgagccgatgagagcagcgccgcgccctatggatatgcagcgaggaatttcttgcagcctcgagctgtcgatggcgtccgataggtggagctgtggccctgggccggcttggggatgagaatgctgctgtacatgtattacttgtaccggtagacgaatgcacgagcggatctgtcgccgagggagatgcttcccgggcgctaatctacgcagagccggactcatccgtcgctgatgcaaatgccttgatgcacatgcaggaaggcgaagctccatctgatcccacgcattgcacatcaaccgccagagcatccctggcggtctccacaacagcgttgattgcacggaccgacgtgaaagctgcagacgaatccatccaaacctctcgaacgctgcatgtgcggcgttagctgcgctttgaggtatcaatggcattgattcaatgcttggcaatgcacaagccacggcgatcgcaagttgcagtggctgtcaccaagattgacttgcttgtgcatgcgccccgtgtctccaacacggggggtgccgccctcatggcaaagtcggcaaatgacgatcacagtcagcaagctgagctgagctgagcactgggcaatccactttcatgttaaaaagacagagtatggtatgcacgatcgcagctaggataggatccgattgctacagtgtaatacatgtaccttcgtagccacgcttaacatccgttgccgccggcgatcacgaggcacgaggtgctgtcgaagatggccaggatgttggtcgtgacggaccagatgagcgcgaacatgaggtagaacagcgtgatgccgccgatgatcttgctggacccgcccttgcggacgagctcctgcgtcgcctccttctgcttgggcagcagcaccaggaagacccacgagaagatcgtcatggcgtacatgatgatgaccgagtacgtgatgtcggttcggatggacttgtcgtcaatctggatgcgctccgtggtgaggttgaacggccggtcaatcagcagcgtcagggtcgtggcgaacggagaagccacgttgtgcgtggcggtgatgaggccgtagacggcgccctcgttgccgatacccgagagctcgactatgacgaagttggagatcatccagcccacaccgtaggggacctgcacggcgatcggcagacccagccagaaccactggctgcggaagacgtcccagatcgtgatgaaggtgcagacgccgtcgatgagcatgacgaagcagcccgtgaagacgatcatgccacgccagctccagtgcagcccccacttggacgtgatcatgatgccgaacatgaagagcaggttgcccaggatgtcgctgatggtgctgttgatgggggtcacgcccaccatgtacgactgcacgggcgagctggccgtgtacgagatgcccgagaagatgttggagaagaagttgtacgcgatgacctggtacatggcgcgcgtgcagatcaagtcccacaacgtcttcaagtactccttcaagtcggccttgggcttcttctcctccttgatgaggaaccacgtcgccgggatcacgagcaccgtgcagacggccaagatgatcataagctgcgggaacgtgagcgagaagtcgaaggtgccgccgtactcctcgccgttgaaggcgaagccggtgatgatctcgccgatgatgacgaacagcgtgcgcaccgtgtagatagccgactgcgtcttgccgcgcttgtccaggggttcgcgctgggccaggtccaccacgatactgtcggcgcacacgtcggccataacgtagccgaaagcagctaagaacatgaggatgacgtacttggcgccttgggacgacgcgtcgtagttgatgcgggcctcgatctcgggcgtgtagtctgcgggggagatgtccttatcggacggtacggtgaagtacggcttgccggcgggcatgcaggccatgaccacgagcatgatcaagcagacgccccagccgataagcatgtacgggcgacgacggtagccgaagatcgggaagcagtccgagatgataccgtagaagcacttgaagctccacgggaacacgaccagcgtcgacgcagtcgtcacctgcgcgccactgcagttgaggtagttctgcaggaacgggtagatggtggccggcagcatgccgtacaccatgccgacggcagcgtactggcagagcaggccgatgttgtctcggctcgtcagcacgggcatgccgccttcacgcagggcgccgccctcaatgtcggtcacatcgggcgtcttgacaccggtgtaggcgtctgcggggtccttggggctctgcgcggcgccgctcacatacgacagtcgcacggagatgtcgagcttgctgggcgtcgcgcccgcagcgtggtgtgcagtcgccatcgttgaagaccggagtcgagcggtggacttaagtgacgcgaggcaaaagcaggaatgaccacggcaccaccgctcgagctcgagcggagcggagcggacagaagcgcttgctcaacaagcggtacatgcacagcagttcgccctgcaactcagggcgggcaggagctaatctacagactaattcagtctccaagcgagcgatccccccgcgcagggacgagtccgacgtggcaagacaaccgctgcaagttgcagcctgcaactgctgcaagagccccgcgagagtggggatgagctggaggtctcagtcttcgccgacgatcgtgggggccagccaagggtaagcgaatgcaatgacggtcatgcgcgcaatgctgaacgaaggcgtttgccagaacgaggcgttggtgcagcgtacagattcggttgtgcttgccagggcgtgatccacgctgattaatgtttttgctaagtattgcacgggtacatgtatctggattaattatctcgacggtcttgccggcccaagatgccctgcgtgttgtctacatgcactgcatgccatgcaggctgcagctttcgaggcgcatcaccgacaagtgcaacgttgtgcaatcactgtggacgaaccgccccccagctggcgacatgctcgggctcagctcccgcggcgcatccttcgttgcgcttgttgagcctgccccaattttaccgtccttttcagcaggactctgcgtttgtgggggtttgtagatcggtgcttcttcgctcggaatcgcttgaagcaaacgcaggaatgcctacgtatttgtaaggatttgagaccatttttaaggaatcgaggccgagaacagactgcttcgactgaagctatcatttcaaatgaagcacacgacacggtcagagacaaatgaatcatttgtctctgaccttgtcgtgtgcttaaaagatttcgactgttgcgtcttcatgactcagcctcaccatacacttccgtggcaactgctggacagttctatcaaccgaaagtgatccttgatcgctgatcacgagtgcagtttaaacaaaaacgggaacacataaaatattgcctccctcaccccccccccccaatgctgtcgactcgacagtgtcgaggctcaacttgagcgaccattaaatggaactcgtatcgtcacggaacctgtcatgtgcagcctcgcagtgacgccgggcgcgtagcattaaattgggcggcttgagagtccatgctgattccggcttgatgtcaccacagtggcttagtgcggcgactttggtcggtctgatacatgtaccttcaacgatgccgcgtacgtctacgacacggggacgccggcctgtgacttgtgacgagttggctcgccgatgtacatgtatttaggtgaccgcgcattctagacatgagagatcacacgtcgcgactttttactgtccgtgccgatcagcgcgtgtgttcccaggtaaggacttgttgaaatatgttcaggttaatgctatgggcacttctacagccaagatggatctacgtaaaggcattcgaactcggaatcgaagagggcatcgtgctgtagatgtgctgagtcaatttggtcacagcaaaatgtcgacatcgcaatggcatggcattaaaaaatcgaaaccacagctatacatatcacttagagcactgccaccggtaagggcgaagcgagcaatgtctatttgacttgaggtcgactagaacaccgcttagttagtttcgaaacagtttactacataccgaatacatgacgagtttgggtattgcaaattaatttagaacgtattatacacattgtttgtctaaagtggtcattaacaatactaattacatttttaagtaattgtaaatcaacaattaaaatgtatatttagttaatcatttttatgagacttgttatggggcccatatgttgaagtgcccataatatgggtacttcaacatgacacaagggatttaacaaagaagtaaatatttttgttcatagagaaaatgtgactacaccaactcgatacgcgctagttgggtgcaacagaatgaaattcgttgctctcttagcagccagagcctcccgcaatgacgaggcacgaggtgctggtgaagatggccacgatgttggtcatgaccgaccacacaatagcgaagcacaggtagaacaccgtgatgccaccgatgagcttgctcttgccacccttacggagcagtcgctgcgtgtcttccttttgcttgggcaacaggaacaggaagacccacgcgaagatagtcatggcgtacatgatgatgatggtgtacgtcagatctcggcgaatagagtagtcgtcttcttggactcgggtgttggtgatgttgaacggagcgtcaatgacgagagttagcgctgaggcgaagggtgaggaaacattcattacggtcgtcagtaggccatagacggctgcctcgttgcccagtccagccagctcgacagtcacaaaggacgagatgatccaaccaacaccagcggggagttgcactgcaattggaggcccaagctagaaccactggttgcggaagacgtcccagacgacgatcatcgtaatggtacagtccacaatgatcaccacagctccagtgatgacgatcatccagcgccagttccagtgcaggccccacttggatgtgatcatgatacctgtagcaaacaggaggttgctgaggatatcactcaaagtgctgttaattggagtgacgcccaccatgtgatcctgcactggggagctgccggtgtacgtgatgtcggcgaagatgttggagaagaagttgtacgcgataacctggtacactgcgcggctgcacagcaactcccagaagctgttgatgtactctttgaaattcgcggcttccttcttctcttccttgatgaagaaccatgtcatgggaaacacggggatcgtgaggacagtgacgacgatcatcaactgggtaaccggatttttaggtcaatcctacattttggtcacgggtcaaatccttacgttggtcacgtgacctaagcgaatgaggtcacatgtaattcgcaaacggtttggttgttaagtaaatgcgttatagcgattctgctcctgatagagagcgacttccgcaccattattccgcgctgtcgtagtcaaaagagtcgtctggacgatagtctgctgtttcatgatccatctcggcatcgtcggcctctagcactagagcaggattcagggtcattagtggcgatggtaggctgctctcataagtctttgctcttctctgaccccacaatgtcggcggcctgacgcaatggataacaacgcgcggtgccgcatattcgtgagaaataccttttcgtgacctacattacgcgatgggggccgtctcatgttgaagtgtcaagctcgagtgctgagctgtggtgcgatgggttagctacttctaggcgcgtataaattttctaagtgaatgctacaaagcacgaaatagaatccggagacgatgtcgaaatttcataatgggttccctgtgtcgacgaagttgttcatgggagggtgtgtagccctacagtctacttgtactattactataataccatgtcgcactatacgagccggttgcctctgtgtactttgtaatcgttgagttgcgttattgtgtagaatgaaagctaggtgcaattctgtatggtaggcggctcaaaatatagcatggtactactagcagtgaaatatggtaggcaaatacatgataagtgtagtggaagttttcacagaagcgagcccagcccactcatcgggtggcttctacagagcgacgctaccaagcgggcagtaggaaagggaggaacagcgaaaccaatgcaaacgacagagagagaggggtcggtttggtagaagacgctagcagaaggcactagcaggagtcaggtgaaacacatacacagattactttgaaatcaacctctttagctaaacagagctttggttcgctcggagcgctagcttccctggtcctttataatagtgctccgaaacctacttacagctctgactcttcgctacaaatacagtcgttatgcctccgagacggccgagttgcgaggatctcccccgcttaccgtcgcggtggacaacagtgctcgcgtccctccaagccgaagctggacgctcgaccagcggaccttcactctcactggcaacaccgtagcaagtgtgcatatgctgacaccttgcaaggtaggcagagtgaattgtaagcgctggaggatcgggcatttgctaggccgttagttaggctaaatgactgcaatgcgccgcaccttgaaacgaaacgagacggcgagtcgagtgtgcggccaaatctgtgcagcatacccatggccttcggcaacgctgtgatcccaggaacagcgggcggcggggtactcgacttcgacctcgagcgaggttacggggccccacacgtcgagcaagactgaaggctaggtcgagataacgctacgtgacgctgagtccatgagctcaagcgctgaatgcgagcggagtcctgtaagcacgggttggtgactttgtacagtgctcgtactgcagcatggtaggtagcaccacctcctctatctagggtattgcgatctgcgctcatactacgagcatcacacacgcgtggtagcagctcactgtttagcaatgtaactactgcccgtgcaacatgcatggtaggcggtctcttgcagtgtaaatggtaggaagcacacattttagcatggtaaggacttgcagcgcaacatggtacttttgctagtagcaagcacgctgtgcaagatgataggcagcccacagtgccgcacttagccagtttctactgtaacacagcagcaactcacggtgcagcacgtcgtgtcctgtaggaaaccacactgacagagtacgaaagcattgagagaggtgtcgtgtgtactgagaaacttgtatgatgtctgaattcttcaggctgaagagaagtgggccctcgtccgcttcgaggctgcatacttaagtatgcattttgctctcattctcatgcgggcgtgcgcgcatcttaccgtctgcatcaatgggtgtgacctgttaagtttggtcacgtgacctagcgtcctgatgtgtgacctatttgaccatcatacccgtgaccaactgttaggattgacctgttttcccctcttcgatcaactgcgggaagctcagcgagaagtcgaaggtgccgccgtattcctttccattgaagaagaagcccgtcaaaaactcgcccatgatcaccatggccgttcgcaccgtgtagatgatagactgcgtcttgccacgtttggcgagtggttcgcgctgtaccaactcgaccgtaatactgtcggcgcacacatcagacatgacgtaaccgacggccgcgaagaacatcagcatcacgtatttagcaccttccgatggagcgctgtagttgatgcgggcctcgatctctggggtgtagtctgagacatcgatgtctctgtcggctggatcagtgaagtacggcttgccaatgggcatgatgcacatgaccagcagcatagcgaagcagatgccccaaccgatgagcatgtacggtcgacgacggtagccacaaatcggacgacagtcggacaggataccatagaacactttgaagctccacggcagcaccacaatctggctcgcagccgtgacttgagaccccgaacagttaaggtattcctgcatgaatgggtagatggtctccggcagcagtccgtacacgagtccaacagcggcgtactcaaacagcagtccgaggttctccttgctcgtcaacacgggcatgccgccttcacgtatggcgccgtcttctcctccaggagggagcgcaccgatgggtacatgctcgggggtcttgacgccgacatagctgccgtcttccaggtccttaggctgcgaggcgccgctcacgaacgacaggcgcttggggatgtcgaggtcttggttgttcacgcctcgaccgccggtgaatgtcgtcggcatcgtttcttggggtgcttgaccagctgagtcgagtcttcgggggtggcttgagggtctgcgagtgaattcacaagtgaacagggaatgcagccgagcagaccaccagagagtgcccgtgcaaagccaaagatggttttgatgcccatgcgcggcttggcaagcccgagcggtcaggagggggatgagatggctttcgtctcccccgctcaggaaaacggtcaaagaacggccacgtgtaggtcggtcgcatcccgcttctgaagggacctgtcgacgcaaaaatcgtcatgctcagacagcaaaacccgttctatagttactgtaaggtcgatgagctaagctcactcagcaggactgaggtcgcgtacaaaatgcagctcgtacagggatgttgacgcggcaagtacagtaccgctttctctagacgctcgactacagtaggcaacttgcgctccttttgatctctcgggcccttgcagctgggccaaaaacgtcattgcttgcaaatcaacccctcgggggcttgacgtggtcacatcagacccactgattgacgggtttccagcagtgcgcgtccagcaccaaagtcaatgcacaatgtgcagtcacaacgtactttgtcctcaaccgagagttcgttcacattatccaccatagaacatccgcatgagaatggattgaactactacgtatttgtacactcaaggctacgtgaataacggggcgttccatgcactccgtcgactaataggctcctagcttagcatccagtgccgccggcaatcatcaggcacgacgtgctgtcgaacatggccatgatgttggtcataatcgaccagatcgtggcgaagatgaggtaaaacgcggtgatgccgccgatgagcttgctgtggccgcccttgcgcaccagctcctgcgtctccgctttctgcgggggcagcaggaacaggaagacccacgagaagatcgtcatggcgtacatgatgataatggtgtacgtgatgtccatgcggacgctgtggtcgtccatctgcacgcgctcgttggtgacgttaaaggggccatcgatggcgagggtaagcgacgtggcaaacggctgcgcaacattggagaccgtcgtgataagaccgtagaccgcagcctcgttgccgacctgcgccagctcgaccacacagaaggtggaaatgatccagccgacgccgtacgggagctggacggcgatcggagggcccagccagaaccactggttgcggaacacgtcccagataaccaagagcgagactgtgcagtccacgacgatcaccacaattcccgtggcaacggtcatccagcgccaattccagtgcagaccccacttggacgtgatcatgataccggccatgaatagcaggttgctcagaatgtcgctcagggtgctgttgatgggagtcacgccgaccatcttcgaagccacgggggagctgcccgtgtacgtgatgctggcgaaaataccactgaagaacatgtaggcgatgatctggtacatggcgcggctgcacagcagcttccagaagttggtcatgtactcgcggaagttggcggcctgcgccttctcctccttgatgaaacaccacgtcatcgggaacactgggagagtgagcaccgcaacaatgatcatcaactgcggaaagctcaaggagaagtcgaagtcgccgccgtagtcctcgccgttgaagaagaaccccacgaggatctcaccgaagatgaccatgaccgtccgcaccgtgtagatgcaggactgcgtcttgccacgcttatcaatgggctcacgctgggccaactcgcaggtgatactgtcggcacacacgtccgagagcacgtagcccacggaagcgagcatcatgatgatgacgtacttggctccttgatccggggcgctgtggttgatccgagcttcgatctccggcgtgtagtctgcaatctcgacgtcacggtcggcggccacagtaaaatacggcttgccaataggcataacagccatgatcaccagcatcgcgaagcagataccccatccaatgagcatgtacggccgacgacgatagccgaaaatgggtcgacagtcagataggatgccgtagaagaccttgaaactccagggtagcacaacaagctgactggcagcggccacttgggcgccggagcagttgaggtagttctgcatgaacgggtagatcgtggcggggagcagaccgtagacgagtccgatggtcgagtactggaacagtaggcctaggttctccctgctcgtgagcacgggcatgccaccttcacgcagcgcgccgccttcaatgtcgcccggcgtcttggaaggggcatagtcgtcatcgacgtttttgccctgcgaggtgccgctcaccagcgacaaccgcttgtggatgtcgatatcgttgagacttggattgaccgtcatggtacgagccgcaatttacctaggcgggctgcacggcgaattgaggactggcagcaggtcaccggaagacgggcgttgagctgagctgggccggaaccgggaggttgcgaccacatgacgctgggagccggctcaaggcagtcaacattttcggatttgagcacgagctttgccggaatgctgctgtttttggcgcccagcgggtggtcaacagcttgaccgtcaacaggtgcactttacgggtagagaccaggagagtgtcgctcgtcgtggcttgacgaacacaccaaaatcgaccgcgccgtcttgtgttcgcgtcgaccttggatcgatcccgcgcatctcaatctctccagctgagcccgtccgtcgggctcagcatgttggccatctgccgagctgcacgtcagggtcgtgccggtatggaggccccaagatcacagctctggcggcacctgctcaatgaaagcgggcgcatgacttgatggattatcgatattgtgtcagcaccacgcgagcagagcgggtgtgctgcggctgttggtgctgggtcagtaccagcacttgctggctatcatgtgggctccactcgctctattcgacacgtacggtgtactatcgacggctgcaaggtgcaagggtgcaagcgctgcaagcattgctcgccaagcagttcaattcaatgccaatgcacatgcagtgcagtgcagtgcaggtgtcctcaacaacaacctctcaaccccttcaccaaataaaatccctcacaactcacgacagagcatgcaaatgagcgtcaagccggaaccttcctgctttcaatatccgttcctccgtgttctggcggcgtttggctggactgcccacaacgaatcttttggtgtacttctgacgtacatgtttcgtcgatgtgatcgaatgggccgtcttttcagtggaacttccaccggcgcctacggtcgaagatggccaggacaatatactgaggatacagtattggtcgcgagtcgtaagttacgactcgcaactcctggtgggccgagacgcaggtagaccacggtttgcccgcccaggacctcggtgtgaccgctttctggttagacagaaggaacaggagaagcccacgaaaatatcgtcattcgtacatgctgataacgcggtaggtaatgtcggcccgcggtctgctgtgcccgcgcatgggttagagagagaaacgtttgtcgtcgtgggattggctatccgataccatggccaccacggttggtagcatttccccacccttggcctcgaccttgacgctgctgccaactgacatgccaacgcgcgggtaaaggatcaaggctgaacctccagattcacctcaatggataccccagtgtcgtggctcgagaagaaggagctatcgctgaatcaacgacgccaatcaaacaacttgaatttgtcgtgagactattagcttacatgtgaaaccgcgtcgaacaaaaagatactaatcaaccaaagtacgaattgggatttaggtacctcgttggaaagagggacgtcttagctatcttttgaggccctccacaacttctaacagttagattagccaaagatatgaccccgcgagaaaattatctcccgtcccagagcaaaattaagatttttttttattggctaccctggtgtaaaattgtacagcggatccaatgatacccttcgtttcttcaaattcgaattgaaatagtcttaaaacttcactttcgtgcgatgtttcacattagtgacacatgctgtcaattgatatcattttggattagcatggacataagtatcacattgattgatcagctgggctagacgacgtacattgctacacttttgaactaaccagagactgcagctcttgagcctttccctgaaggcagcgacgctcacacttatcagctctgataaggcctgtcaccttctggtgaatatcaacctcgatcaaattgatacttatatcctcctcggcttgctcatcgtcttcgattccctcgctgtcccccgtcacctctctatcctcttcagctgactcggccgtggtccaatcttcatcatcattgctttcatcaggctcctcgctctcagacgagacgtcgctggcggcatgtgccgcaacgtgcggggaggtcacgcggggtcgatttttctggttgcgctgccgatcggttcgagaaggcgtgcacgccggtgatttgtgcagctcggaggcactctcctcctgctgcggatcggaggtgcgcgcaagctgctgcccaggagctgccgaagcgtgctgctcgggcgcatacggcgtatgctgctcgagaggaggggggtgttgacagggaggggacgcgggcggcaccgaggcaccaacggactgtggcgcgagagcgccggaagcctgtgtgccggcgggcgacgactcggggccgctggaggtctgcgatggcagctcggaggtcgagcggtgggcttccatgtcggcggtggtgtagatcttctttgagagtgaggtgttgaggaagcgttcgctttagtgacagttcaggttttcaaatcacaaatcgggccccttctagaaacttcacttagatacgaaaaatagcagccaattttcaagcgcgataatctcgataactctaaatggtggcttagcatcattttgttcgaggaaatctcatgtaagaaataaaaacactgcatgaaagactacgtcgggctccacggaccgacccagggcattgactgcggggaatatgccatgctgtggtgagggagcacgcgcagtccaccaccatgacaataacaactgtcaacacagtcatccaccgccaatttcaatgcaacccccacttggacagggatgcctaaaaacaatttgatgctgaaataaatgcaatcattttttacaataaatttattgacctagtttccttaacccgtatcaataatctatttcttggttcgattatcacatacaaactccaagtgcacttgtaattagtcaccagaaaaagggcaaacaataatttgtttacctgattttctctaccaaaaatattatctttggtttgatctggtcgcaatagataaaaatgcaatattcggcaaccctgcttggacgtgatcatcctacaccagcagattgcttcactcgacgtgatgttgatcggtgtgacacccaccatgtatgactgcacgggggagctggcggtgacgcttgcgaagatgccgctgaaaaacatgtaggtggtgatctggtacactgcgcgacaacagagcaactccctgaagcactctcggatgttggcggccttcgtcttctcttccttgttgaagaaccaagttatcggtagtactggtacggttaacaccaccataatgatcatcaattgaggaaaaccttagtgagaagtcgaaatcgccgccatgctttttgccattgaagcagaagcccacgatgatctctcccaggatgaccacaatgtgtggatgcacgactgcgtcttgccactcttgtcaattggttcatgtcgagccaatacgcacgtgatactttcggcgcatgcgtcgggcatcacgtaccccgaaggcagcgaagaacatgaggatgacgtacttgcgccttccgacggagtgtcgtagtcgatacgcgcttcgatctcgggtgtgtactcccccgagaccttgagatcgcgatcgatgacatggtttagtacggtttgccaataggcatgatggccatgaccagaagcatgacgatacagatcgaccagacgatgcgcatgtacatccggcgacgatagccgaagatattgtaatatgtaggccggcagtcggatagaatgccgtagaaaaccttgaagctccacggcagcacgacaagttggtcagccgctgttacttgagatccgaagcagttgaggatactccttcctgcatgaacgggtagatggtcgcgggtagcatgccgtagacgaccccgacagcggcgtactggaagagaaggccgatgttgtccttgctggtcaagatgggtacaccaccctcgcgcaaagctccaccaggtccgcccggaggaggcgcgccaagcggttcgggggtcatgacggcgacgtatccctcttccttcgcatgggacgcaccacttacgagtgataggcgctgagggtcgatgtcgacgttggccacgccatggctctttccattcggcgcagtaggcatcgttcctggtcaatgcggcgagttgactcttgcggggctctgaggaagttaaggaatgagagagctttgagacgagcattgacaggtatgttctcagagctcaggaagctggtacagctattccagcagagcacacatgcaaggaggacgcggaggtagcgtggagtgagtgagactcataccaatagtttacgtcagattgggcgggatgtcaagtcacatgacccgagccaattaatgcggtaactcatcgaccgtcatggcgccacgaggaccactttcaggtcaaataagagcaggataatacagtagaaaccttcaaagagatcagctacgaacggatcttaccaaacttcttggaccgacacgtcaacggtatcagagtgaaacgtatttgcaatttgacgtcggagccgacaaactcgcaaattgcaagtcgcaatgactaatcgaaatctgcgactgcgtgtactttagatgtttgaggtctctcctactcaaaccagcgtttgaagatcgttaagctcctgccagcactgaaccgtagttgcgctgaagcgtctacttctgtaggtcacgatgtgtggtagatggcataaagcatgttgaggtgtatgtttacagtagcggcataataatgaaaaaaatagccatagttgcacggagcgtgtatgtatagtacaggtatacaaaagcgcatgattgctatggtagacgcatagggtcaaattgtacaatagctggtagataactaactagtaaaagaatataaaggggaaaagtaagagtagaaaatcaataacttctcatatcactccactcactcacgctgccttggaatagcgacagcggacgttcatcaatgggggagaccaggtccaaaagaggacacagcactgcaaccaccgacatcccgagtcaatgaatgaagtcgaatacgatcatcaaagttattgaggttgtctacttggaaagtcaagtagaaaagaaggtactatagaaatgatcctgtgtaagtacggtcttgaccttccattgaaggagttgccgtagtttatgtgctacaatccaaccatacgctcaagtctgaccttctgtcgtcgatatcattggtcgaatcacttcaacatggatgacaacaacaagaagaacgcaacaaagcaaaggtttctgttcataaagcgaagactactccattgataacattgctctcttagcagccagtgccccccgcaatgacgaggcacgccgtgctctcaaagatagccatgatgttggtcatgacggaccacacgatcgcgaagctcaggtaggcgaccgtgacgccgccgatgagcttgctgtgaccgcccttgcggagcagtcgttgcgtgtcctccttttgcttgggcagcaggggcaggaagacccacgcaaacgcagtcatagcgtacatgatgatgatggtgtacgtcagatctcggcgaatcgagtggtcgtcttcttgaactcgagcgttggtgatgttgaacggagcgtcgatcacaagggtcaacgctgaggcgaagggagaggcgacgttcgttaccgtggtgatcaggccgtagacggccgcttcgttgcccagtccggccagttccacagtcacgaaagtcgagatgatccagccgacgccgtacgggagctggacggcaatgggagggccaagccagaaccactggttgcggaagacgtcccagacgacgatcatcgacacagtgcagtccacaatgatcaccacggctccagtgacgacgatcatccagcgccagttccagtgcagcccccacttagaggtgatcatgatgcccaacataaagagcaggttgctgaggatgtcgctcagggtgctgttgatgggggtcacacccaccatgtagtcctgaataggggagctgccggtgtacgtgatgtcagcgaagatgttggagaaaaagttgtacgcgatgacctggtacactgcccgagtgcacagcaagtcccagaagctgctgatgtactccttcaagttggcacgctcgaccttctcctccttgatgaagaaccacgtcatgggaaacacggggatcgtgaggacagtgacgatgatcatcagctgggggaagctcagcgagaagtcgaaggtgccgccgtagtcttcaccgttgaagaagaacccagtgagcagctccccaaagatcaccatcacggtacgcacagtgtagatgcaggactgcgtcttgccgcgcttgtccaagggctcacgttgagccaactcgcaggtaatactgtccgcacacacgtccggcatgacgtagccaaacgcagcgaagaacatgagcatcacatacttggcgccttccgatggagcgtcgtagttgatgcgggcttcgatctccggagtgtagtctgcaatatccacgtctcggtcagccgcattcgtaaagtacggcttaccaatgggcatgatgcgcatgaccagcagcatgatgaagcagataccccagccgatgagcatgtacggtcgccgacggtagccgcagatcggcaggcagtcggacaggataccatagaacactttgaagctccacggcagcaccacaagctggctcgcagccgtgacttgagcgccagaacagttgaggtattcctgcatgaatgggtagatggtctccggcagcaggccatacacgagtccaacagcggcgtactcgaagagcaggccgaggttctccttgctggtcagtacgggcatacctccttcacggatggcgccgccttctccttcaggagggcgagcaccgatgggcacgtgttctggggtcttgacgccgacatagctgccgtcttccaggtccttgggctgcgaggcgccgctcacgaacgacaggcgcttggggatgtcgaggtcttggctgttcacgcctcgaccaccggtaaacgtggtcgtcatggcgaagcgaggagtcttgagctcaatcgaggaggtcggcggtgaattggcgtgtgagcagcgatcaggagcgccatggaaggacggagagagggcttccgtgcccggcgtgcagggcaagaggatgcgctcgatggccaaaccgctccactacagtacatgtagatgtagcggagaccgcgggatgcttcgacgttcgtctccattgcgcccctgctcagtgcctgagcctcttgagactgtccgaatgatactgtgtgtagttactgcatctcatgcatgaagcgggcaaggctcaggatagcgcgggcactcgccgtgtcatactcccccggctctgaccttgtcaaaccagttgcagcattcccgacagtgccgacgagctacgcgtcaaccaagtcgccgaatcgaacgtgtccgacatagcgacagcaccacacaggagcctgtagacgtatctgcgcggccggcttcggatccaaagtgaagtcgaagttgtccttgcttgcaaatcaggctccgtactgcatcgacagagtgaagctcgaaccgcagcgatgagagcgctgactgcataacaagaggaagacgctcggggtcctggacacacgcgtaagatactgtaatgcaagcactttacttcgacaatacagggcgccttcgtccggccagaagctgctcgtcgaagtctactacgatgattctaccggggagttcgcctacatgggcggcagcagttgccgcacggccttgccgaacacgctggacagcgctgcccgcacctcggcgttcggcaccctcacgaggtccgtcagcagcgggtacagccacggcatgtggcgctgtagctacaagcagaaaacaataacaacatagacggcatttagtaccagaattcaccaccagtaagcatgcatgtgcagtcgctcacctcaacgctgtcgaactctgcgagctccttcagcgtcgcaaccatcagcggtgtgaagctctcaacgcgctgatacgcatcagcaggcacctgatcctcttcgacattcgtccgagctgctgcgcctgtccaggccagatactcctccaatgtctccttcaccaactgtgccatgtacttgcgagcctcgtcctgttccccgatcggcgcgatctcgctgttgtcgactctgcggacgagcgccgtgaagagcacgtggaggtactgctgcttgcccagcacttcctgcggcagcagactcggcagctcgctggaagatggcgccgtcattccgtagcgccaaccggcacgctgcagataccgacgtagcggcgtggcatcgttcaccttgcgagcgaacaggaaactctcacgcagacatgtcaacagcgagcgagcgtgccccacgctcagcgacaagtgctccttgcgacggctcgccagcacgttgcctgctactcgctgcaatgccagcagcacggccaaatgcgtgcgtgaaggaacgcgttgggcctccacctcttcgacactgatcaccttcggtgggaagctggcagcgaaggtgaagcccagagtcgccacaacaccgggatacatactgaggaatgaaggctggcgcggcgaagtgagcatggcagctgctgaatgagctgtcggggaacgtgggggaggcagcgacaacgacttcttcgaaggactttcggcgcttattgcttccaccggagactcaggggcgggtgtgctgtcgacttcgtcttcaggaggcaaggcgaagaatacccacgtcggctcggcgcgcttcataacgttgcgtagctcgtccgcgatgaggccccagacgtcttccgggaacttgtggccgtgcgtgaccaacatgacctcaagcgcgcaagcggatgcggccgcgagctgctcctccgcatcccctgcatccatgcacttacccagcaggaagagaacctccggcaagaagccaacgatgtcgtagaactgtccgaagcactccaatagccgctcgaggcacagcgtcgccgtcgtcttgccagcagcgtacggggccatccgagtcgacgggttgcgcgctggcggcaacggtagctttggcagcgtgtgtgctcccttctcgaccaccacctcgagatgccgcagctcatccagcaacgggatcagcacgcccttgaaaatcaaaccccaaagtccagaggagaacttcgttccatgagtctccagcgcatcgaagagcgcttcgagagctgcgagacgcacatccagacggcggtcagcagcgagcgtagatagagctgtcaacacgggccaccacatgcgcgtatgcgccgcagagtcgttgtatgccacctcggtactctcttggtgttcctcttcctgcgcgtcgaccgatcctgctctccgtcgaggcgacagcggagaggacgccgaaggcagcagctttctccgaggcgacagctcagccacctcctcttccagtgagcgcacagactcctgcttctggtagcgcaccgaagcccgcttagatggagactgcaccccggcaggtccatctgccgcttcagcggcgggatcttcggcaactaccttgaccttcttgaagccaacgcgcgcagcctgcttggccgcggccgcggccgcagcggcggctgctgccgccgctggagctgttgcagctgaaatggacccagccgtctcacgcgcagtgagaggctcgatgacctctcctgtcgctagcttctcaatgcacacactgcgcagcagcccgatgctgtccacgcccagttgtgtgagcgcgagtcgctcctccatctgacgctcgacctcctcgcacccgcaaaccgcgaacgctagaaggcactccacggcgtcaacgaacacgtccacgatgcagtcaaagtgacgctccaagactccgcgcgcgacttgaaagcccaaaagcaccacgcggtcctcgctaccaggcgcatacgtctcggcagcaacgcggaggacgccccagatcgtcttccagccagagcggatgttgcccacacgagcaagcaccaagttctccacacagcgcagcacaagctccctggtctcgagagaagtggcattcgccatgatgatctcaaacggcgccagaaacagacgctggaagttgaagtcacgaagctccgcgcgctcgaggaatttcatgctgagctgacgcaacgagtcgatagcgtacatgcccacagtcaggtcttcgtggcagccgatcgtggtgaaatgtctcgtgagggtctgccacgtagccgcccacaccatacgcgagcgagtacgcatgttcatgtcggccacttcgaccagcttctgcagactgaagacgcgaggcggtgagccaccggccgcgccggaaggtccaacgcctgagcactccgacagcgacaccacagtgagctggataacgaagtcctgcagagcctgatcactcagcgataccgaactcgagaacacacgatcactcgccagctggtcaatctctccgagtacgcgcgcagcattctcgtcttcgatcgcggcgctctgggcttcgtccagctcagatccgctgcctcggccgccaatgtcacggtgcgactgcgacggcgacgtgagcgacatcgatgacgttaacccgcctcgcttactgctcgcagacgacccgagcatactgaacgacggtgtggtgttgccgctgctactgtgcgagctagtgtggctcgtaagaccaggcgatggctgccggttgaagtaagacgaatcaccagagaccgagccggctgcggagcgctcatgcagaccttgagcgtgtgtctgaattcgcgccaactgtgaaatggcctgcaggacatcgtgccaggagtcgccaaggtagtttccttccttcacgctgatagagatgagggccttgattgcctccatgttctttgagcgcatcaaccgcgagtttgtcgtatgaagcgcagtaaacttggccaacaccgtcacgaaggcatcgcgctccgctggcatgttcagtctggctgagaggtgcaccgcgtggcggaaagaatccaagcagagctggatggcctcagcggactcggagctctcaaaggttaccgagcacgcagcaaggagcggcgcccacagcgtctcgaacattggccggacatgagaccgctcattgtaccccgacacttcgcggaacgtagacgacgaaggatccggcgtcagcagagacgatgggccatctccaccccgctgtgaaggagcggcactcgagccagcagatgcactcgagcggttgccacgcggggagagagggaactgttgctgcgcacgagctgatgctggcacccgacgcttgaatagagcttcagactggcgcaccattgactcacgctccttgatgtaggcgtcacggcgcatccggtctgtggctgcacctgaagatccaaaaagtgagctcgcagcacttggtgcaggtccaccacgacgactacggaagtcatcgtcctccttgagagaaatgggcgtcgccttgatgcggtcgaagatagcgcccatgtaatcctcaggcaagtctttgccgtcgttaatgccgcggttgttgcgcagaaatccagccttgtccatcttcttctcctccgcaatgctggggttgtgcaggtcagtctgcagcatgataattgagaatgctaggatgaatgccgtgtcggcactagggaacagtccgggcgggcacgagttgaaaaacctttcagcaaacttctccatcatacgatcaattttctgcgattcaccgggtaaacggaagccagcgaggaagtgacgaatagccacatcgatttccaagcccgtgaagtccatcatgtcaacgtattcgtgcagcaccttgacacagaagccgccctggtagtgcacgccatttccaagatagtcgcccaccatcgtcttgtccagcttaccgttgtacgtttgcaggaactgcgccacatcacggggcgaaccttcgcccatgtgtccgtgggcaacgagatacgcgataccggcgctgggtttcacattaaacttgaggatgcccgtggccaattcctcctgtcgcttcttcttgctctcgaaggcttcaaccgccgacatggtggatgaattgacatgaatcacgtctggtggggccacagtgtcttcctcgccgccggcttcgctgttgtgagcctcgctttctccttcatgctgggaactctgacgctcggcctccatgaagtttgcagcctttttgagcgatgcagtcgtggcagtgaggcactcgaggcccttgagcgcaagcgccgcgtcttgctgctgcatcttgagtcgcgcactggtagacagactagctgcatactgctgcgccgcggcgtcttgggagcgtccgccctttgcagccttggcaagtgcatggacaatctgcttgaacaagtcgttagtattccaatcacagtcgtagttgataaagatctcgcccagcgtctgcgggtcgtcacagatcgcgtgtagagcctccagaaccagcaacttgtgctcgaagctcgcgttctcggactgcagcaggcgcaggaagatactcgtgatgaagatatccagctccgtcttcaagtgacgcttgaaattgcgcagaagcaccaagaagacctgtagtgatagcgacacgatctgtgtatagttactggtgcagttttgtagcagcgactggcacaggtactgccgaattgcgtgcacaaaccgctcgccacggcggaacgacggtccagcgttctctaaaatctccttcaccagctccagcgatagaatcttgctctggaacgcaaaagggtcctccgggttagcaccattcccagcgtttccagccatagatccattagcgccgttcgcggtcggggagtcgtctgccactgatctcatcgaaatccgacacagcgaccggaacagcagaaacgcgtccttgtgcagcacagacgggaacgccggcgcaaacaccggctgcgacagtgtggccaccgccttcaccttcttagtcgccgtagatgagatcgacgccttctccgagtgcgccgcaaagcgaggaagctgcagagccgtcgccaccgccgggtaccaaggagccaacgcttctgcacgcagcgtggggatgctcaggtcctcgtcgctgtcgctctcgatgatttcttggtgctcttccgtgtgttcttgatcctggtcctgatcctgctccccttcctgctgactctgctgctcctgctcctgtttgtccagcgacgcctgcagcgtggccctcgtctcctcctccacgcggcggtcgaacgtctccatccgctggaacacgatgctgatgatctgctgcagcgtcgccttggccacggtccggttggtggcgctcttgctcacgaggtgcacgtggtagcaggcccgcaccgctctcagcagcgcgtgctcgtgcacctcgcaggtcggcgtcgtgacggccgtcagcagcacgcgcagcacttggatctgcacgccctcgtccgggtggtcgttgcagtcgcaggccacctcgacgatgcagtcgatgagtctgtagctgtcttcattggcgtcgtcctccgttgctgccgcgtcccgaccaccactggcgggcgtgttgatcccaaatgagggggcggcgctcgaccccgacccggagctggaggacgctccggacccgagacccagaccgaaacctgaccgccgacccgacgtggtggacgccgctgcggccttctgcacgaggcggcggcgcaccccctcggggataacccccgcctccttgaggaacccgaaggccaggaacttctccatgcagtccagcgccacggccacgagcttggcgtagcgggtcaggcaggccagcaggaagggctcgaacggcacctcgagggtaccctcggcgctggccgacgtaaccttggcctgcgccgcgtcgatcatgtcgcgtaactcgcggtggctgcgcgtgcacgccttgcgcagcttgcccagcgacttgagcaccagcgcctccatgggggtacgcttcggttacgctgccgtagcgcgcgatccagagagccaatacgcgtgatcgccagtgcgatcggaagccaggacgacggcggagatggtggtcgtgctgcggcgcgccgaaaccttgccgagagcttgctacgcgcgcgcaaggagagccgaacgagcgtcgggcacacgtacgcacgtgaaggctcgctatggctcccccgtcgttacgccgcgaaatcttcacaatgtggtgcacaccagtgtacccattactagaaagtatccattctaaatttagaaacatgacttgaggtgatatcagattctaggtgcacagatcgtctcaatgattgtaccggtacactacagtattctgttgcttaacagactacatgagctgagcaacgaggtgtggaccgcagtaggtaaaccgtgaccttgagtcggaactatcgcgcagattctaacttatttcgagttttgtgcatgtacgatctcaaacgcaagcacacaagtactgagtaatgtacacaaaactggaggtctcataacgcaggttctgaccacaagacatccgctaacactgcttcgcgcccacgaattcgtccgctctcagatcgatgtacaaatacgttgcactttaagaccgttgacgcgactggcgttaacagtgtaaagtaaaaacaaaaataaaagacgtgtcggcgaagaactgaaattgacgatcgttttgtatgatctcttcgaaggttataatactacatgtacgtgttatcctgtatttgtttgaactgaaagggtatccgagacggacatgactgtggtcaggacatataagtggtcagtgcctggtatacaagtgaaggtcaataaggaaaatgggtacccggccgtagatcccataatattgctcgctacaaagcctagcgcacatggttcaaaagaggagcttctccccagcaatttgagcccattcacaatcacgagcgactgattctgcacaagcgccgaccgtccgaaggcaagccgatacaaagcctatttgagcgctgggagcctcttatgcacaaaagcggggcattgtaccaaattccatagtttaaccaagtgtgtttcaggtgaccaccaatctgtccactaaatctcgtctgcgacgtgtgaatacttgaagaaagtaatgggacaacatgtgaccatttatatgtccggcgcggatagtgccaagacaataaatctggtgtgatagcggctcgattgccgcattatataattggctcgaggtcatgcgatctggcacaagcttttgatgaatctcactccatgttatagtacctcctcatcctccttgcgtgtgtgctctgcaggtaccttctaccaaacaacgagtacatgtactattatatttgtgccatccagcagcatcgtcttgagctctgacaacatttggtcaatgctcgcctcagagccctctcattcctcggggcctcacgtgtgtcgactcgcccccttgaccagaaacgatgccgccgccaaatggaaaagaccatggcgtggctcctgtccgatacgaggggccgaacgaaggtgcctcgtgctatcgaagtaaaagtgctcgcattactttgcgcgagcagcggttcgaacttcaaactgttgtgatggggggtaaagtcggagtttagcgaggacaacttcgacttcaatttggacggccacgcagatgtcgaacgggattggttgacgcggagctcgtcagcagggtcgtacggcaacaggtttgacaaggtcagagcaggggtagtacgacacgactatttaatgcccgcgcgatcctgatccgcgtggtgcatgagatttaaaactaaactgctcaaccaaaagctaccaatctactacatgtacatacctctgtaaactctttaagaagagtcgaacctgaacgggggtacagtggagacggacatcgaagcatcctgcggaccgcaggctgcagtctccgctgttgtacaggtaatggagctgtttggccatcgagcgtatcccattcccccgccccacgccgggcacggaaggtctccctccgtccttccatggcgctcctgatcgctactcacttgccaattcaccgccaaccccctcgactgggctcaagactcctcgcttcgccatgccgaccacgttcaccggtggtcgaggcgtgaacagccaagacctcgacatccccaagcgcatgtcgttcgtgagcggcgcctcgcagctcaaggacctggaagacggaagctatgtcggcgtcaagaccccagaacacgtgcccatcggtgctcgccctcctgaaggagaaggcggcgccatccgtgaaggaggtatgcccgtactgaccagcaaggagaacctcggcctgctcttcgagtacgccgctgttggactcgtgtatggcctgctgccggagaccatctacccattcatgcaggaatacctcaactgttctggcgctcaagtcacggctgcgagccagcttgtggtgctgccgtggagcttcaaagtgttctatggtatcctgtccgactgcctgccgatctgcggctaccgtcggcgaccgtacatgctcatcggctggggtatctgcttcatcatgctgctggtcatgcgcatcatgcccattggtaagccgtactttacgaatgcggctgaccgagacgtggatattgcagactacactccggagatcgaagcccgcatcaactacgacgctccatcggaaggcgccaagtatgtgatgctcatgttcttcgctgcgtttggctacgtcatgccggacgtgtgtgcggacagtattacctgcgagttggctcaacgtgagcccttggacaagcgcggcaagacgcagtcctgtgcgtaccgtgatggtgatctttggggagctgctcactgggttcttcttcaacggtgaagactacggcggcaccttcgacttctcgctgagcttcccccagctgatgatcatcgtcactgtcctcacgatccccgtgtttcccatgacgtggttcttcatcaaggaggagaaggtcgagcgtgccaacttgaaggagtacatcagcagcttctgggacttgctgtgcactcgggcagtgtaccaggtcatcgcgtacaactttttctccaacatcttcgctgacatcacgtacaccggcagctcccccattcaggactacatggtgggtgtgacccccatcaacagcaccctgagcgacatcctcagcaacctgctctttatgttgggcatcatgatcacctctaagtggggactgcactggaactggcgctgatgatcgtcgtcactggagccgtggtgatcattgtggactgcactgtgtcgatgatcgtcgtctgggacgtcttccgcaaccagtggttctggcttggccctcccattgccgtccagctcccgtacggcgtcggctggatcatctcgactttcgtgactgtggaactggccggactgagcaacgaagcggccgtctacggcctgatcaccacggtaacgaacgtcgcctctcccttcgcctcagcgttgacccttgtgatcgacgctccgttcaacatcaccaacgctcgagttcaagaagacgaccactcgattcgccgagatctgacgtacactatcatcatcatgtacgctatgactgcgtttgcgtgggtcttcctgttcctgttgccaaaacaaaaggaagatacgcagcgcctgctccgcaagggcggcaagagcaagctcatcggcggtatcaccgtgttctacctgtgcttcgcgatcgtgtggtccgtcatgaccaacatcatggctatctttgagagcacggcgtgcctcgtcattgcggggggcactggctgctaagagagcaatgttatcaatggagtagtcttcgctttatgaacagaaacctttgctttgttgcgttcctcttgttgttgtcgtccatgttgaagtgattccaccaatgatatcgacgacagaaggtcagacttgagcgtatggttggattgtagcatataaactacggcaactttttcaatggaagttcaagaccgtacttacacaggatcatttctatagtaccttcttttctacttgactttccaagtagacaacctcaataactttgatgatcgtattcgacttcattcattgactcgggatgtcggtggttgcagtgctgtgtcctcttttggacctggtctcccccattgatgaacgtccgctgtcgctattccaaggcagcgtgagtgagtggagtgatatgagaagttattgattttctactcttacttttctcctttatattcttttactagttagttatctaccagctattgtacaatttgaccctatgcgtctaccatagcaatcatgcgctttcgtatacctgtactatacatacacgctccgtgcaagtacagaaaatggagagagactttctactgtgctatgcgtctgtagacatcttggaggccctcgaacatgcctgctacagtacgatcttggtaaattaccaaggtaaaagtttcaattgctatctgaaacaaatcaataaaaaaatggcccaagaatactcaacttgcaacaagctcccttaaattgcaactcggcctacacttattggtctccaataaccgaaacgagaccttccagcgctgcttggacaccgcccatgcagagactctcacgcgcgctgtatgcggcatcggcgcgccgcgctggtctatccgcctctgcatgtatctcctctcgccatgtagcggctttcacggcttcaaacgcccccgcgtggcctccaaaccggcggttcttaagcgcaccctccgccgtccaagagactgccaatctcggccgctgcgcgcgtcgcagggccaagaagcagcgcgccgccgctgcacatgcgagcgcaagtgagggatcaggcaatgcagcccctaataagcagcagaagaaggccaagaagggcaggttcaacgtgcaccgctgcgtcgcgcagcagcagatgccgctgagagacgtgctgccgctggtgcagagcgaggtgcgcgcgcacacgctgcgcgtgcccatggcgcgccacgccgtggactcgttctacttccactgcgcgcagcaggcggagagcagggagctcagcgaggacctgcgcctgcaggtgctgcggtacttcgacgacgagctgttcacgtgggacaaggcggagcagacacagcggttcgtactgggccagtcacttaatgaggctgtgttcggctcggtgatcaagctgcacctcgctgcgggggacacggaggcggcgtggaagctcattaacaagctcaggaaggcggtgagggcgagaagcaaggcgggacaggaaccacccaagctccacttcaggacggtgagcccgctgcttgagcacgagtgcagacacgaccagttcgcgagcgcgtactcgaggtggcagcagctcaagcagcacgacgtggagtggaccagcgccatggaggacgtgctagtgcagatggtcatcgcctgcgtcaagagcgacgagcagcagctcaacgagtacacggagatgcccgagagcgaagccagcgagccgcacttccacgcgcagatggcgtcgctgctgcatgacctacagatcacgtgtcgtgaggtgtctccgtcgaacgctcagcgcttgctgcatgccttccgtgatgctggatacatcgtcgagaatgtgccgagcgacgcgcacatgagaagcaagtgtccgtgctgtggtcaagcactgtgcaagcaggggatgacggagcaggagcgggcgtacatgctcgctgctatcgagtcccgtcggagcaagttggcgccggagaacacagtcaaggagtatttggacccgttccgcgagtggctgatgctgcgtcacgagaatttccagcttcaaaacgtagtagcgggttcgaaggacggaaggccgctgcacttcgtgctggacggccccaacatcgcgtacattaaccagaacttcgaggccggcacttaccgtcttgatcaagtcgatgccatcgcgaaggatctgcaggctcaaggccacctggtcagcattaccatgcctcaggcttacctcgcggacaagttcgtggtgcgtatccgtacgaagcagaacaagtctatgcgtcgccaaggcaagttcgtctctcgcgagcgcacccccgaggagaaggccatcatggagcgctggaaggatgaagacatgctctacagctgccgcacagacttcctatcggacgacctcttctggttgtatgctagcgtgctaatgggacgcgaaggccgcgtggtgaccaacgatcaaggccgcgaccacgtcttcgctctgctgaacggctacaccagcaccagcggcctagctcgacctcaaaagaacggcaagaagagcccctctgagggatcaagcactcctgctatctccatggacctcatcgcgcgctggaaggacatgacgaccgtgaacatcgagatcaagcacgaagaagtcgcgttcaatgctgcagctgccggcaacttaaccacgccgattccgatcgagtcgatccgcctgcggcatccagagccgttctcgcgcgtgccgcaggtgacggcaccgcagcacttccacttccccatcgcggagcaggcgaacatgaacgagcatccgaaccagtcgatgggtcagaggaagcgcacgcgatggctgtgcgtacaccgcaaggacgcggccaactagacaactaaccaacctcatagactgtaacctccgtggtgacactttcactacagtgggatggatgatcaccacttcatgacgcattcggtagatgatgaaaaatggcattatattgaggagactagtgcacagtctggaagccttgcaggcttgcgtggcttggcttgatctcgcttaggcgtagacgcacttgccctcgctgcacttgaagccggagtcgcagccgttgatgaagaggctcgtggccgggttgaagcactggccgttcgtgggggcacggcaggcggtctcaccgcgcgggcagtactggcccgaggggcaggccttgtagcagatcgcgccgttgttgtcctgctcgacgttgtgcacgcggaggtggacggaggcctgctcctcggcggccatcgactggaacaggcagacggcagcaatgagggcggaggtgaacacggtcgagaacttcatggcggcttggggacttggagtgtggctttgggggcgaatttcagagtgaaccaagacctgaaggccccactcatgaactgctaggagttggtgctggtgctagcggtcgataaatcaggatctgtggaggcgagcggcaggctcaccttagttatacactgtagacatctcattcttgcgcaaatccttcaaaacacaacatcgcagacgacgtgggtgaagcgtgtgcagtactttccattctgtgttgtgccgtctgaggtgaaacacagtgctcggcggaccgtgcagcaaaatatgacttgtgaagtgaatgggaagtccgtctccgcatgaagcaccaaattttgcagcaaactcgcttgaagtgactgcgcacattccgaattgtttccgcagcttgttgttgggcgtcaccggtatcttcgatctcgtcgaggaagacctcgtcgagcagattcaaccgctcaggcaaagtgaaggacaggaaacgggtgaccgtgctccttcctactcaatgagtcttactcatgaaataatgcgattcgagctctgatgccgtcgattgcaggatagactcgatgtccactttcgacaaagctttgtactgtacaacggcgccgacgccaacaccggaactggaccacttcggtactgtatccacggtttcaacaataggttacagcacatgtagctcttgtctgcctaccttgcgatcgacttactggtactagcccacttattgagtgagccggcggtgctgctcgatcaagcctatccttctgattgtttttggcaagtgaagataccatcaatcctcaccggttggctcggtgtccgcagatacacttacagtcttcagttaccacgaatggatcgcgcgaccacttcaaccagtgccctgcgtggtgatggcaaggtagaagataagcaagaacacagcgattcgaaagctacgacaaaatgtattgcctggagctgcttgtttgtaccgtaaccagtagatgtcgtcttttgctgtgtaggactactgcgccgccgcgcagttgttaatgaagctgacagttgtcgttgcctgctttgtcatcagcgagcttggtcgcttgggtgctcggatttggcccgctcttctcgtctttactggtagacgcacttgccgtggctgcacttgaagccgcggctgcatccgtgctggaaaaggctcgtagcggggttgaaacacaggtcgccggtcggagcacgacactcggtctcgccgcgtgggcaatactgtcctgtcgggcatgctttgtagcaaatgggagcgtgggcgggtaaagcttcactggaggtggcggcggcaacggtggtagtgatggtggtggtggtcttgtagacgcatttgccgtggctgcacttgaatccggcatcacatccgtgctggaagagactggtggccgggttgaagcacaggtctcctgttggggcacggcactcggtctctccgcgagcgcagtactgccccgtggggcatgccttgtagcaaatgggaccgtgggcggacgaaggcgtcgtcttgtagacgcacttgccgttggtgcacttgaagccgatgtcgcatccgtgttgaaagaggctggtggccgggttgaagcacaagtcgccggtgggggcgcggcagtttgtttctcctcgggggcagtactgtcctgctgggccttgtagcagatggcgccttgggtgttggcgttcacgcggaggaacgtcgtggcctcggtttcggcggaggtggattggaacaggcaagcgacggtcacgaaggcagcgacgagcgcgatggagatcttcatgctgagtggtttggtggggggagattcttgggtgaactgtgcaggtgcgaccgaattcgagagtgagagcggataaggcgacaacggattgggggtaagttgtgatgctgagctgggcgttcgctcgatactccttggcatgaccaggagccctcaccatggtgattcggacagcaaaaaatgtgagacgagcgctgtggaatcaagttgaagtggtttctggtgaaaaccgcttcaagctagtttcgagcacggatcctgtagagcctcagacctgactaggatgtggacgcaagccgcgccgaagagcataacgccgctggttgcgtgagcacgaggcggagtggagcgagagctctggcaacggttgaaagtgtcacgtcgtgcggttccgtttgtgagctacaccaagttgttcctgtagcagagcgcttccctgcgcgggctgtagatcaagcgatcgcactcgttggttgtgggtaccgaccgcctccaagaggcgagtagattgcaattttcgcgatcgtttctgccagggccgtcgcatgttgatgctcatttggcgcggtcgttgctgtagtagctgcgtcggtcgttttaagccctggggcgtgatagtggccgtctgcggtgccatcgcccgcaatatgatatcaagcagcaagtactacagagcagatttgagctgtgtattgaccaagccaggcgtcttaacttgcagattctatcttagcgtagtgcaaagaggcagtgttcttgatggccctgaggctatcattcccctgaaacaacctggtgcagcaacgaccgcgccaaatgagcatcaacatgcgacggccctggcagaaacgatcgcgaaaattgcaagtccacgagctctactcgcctcttggaggcggtcggtacccacaaccaacgagtgcgatcgcttgatctacagcccgcacagggaagcgctctgctacaggaacaacttggtgtagctcacaaacggaaccgcacgacgtgacactttcaaccgttgccagagctctcgctccactccgcctcgtgctcacgcaaccagcggcgttatgctcttcggcgcggcttgcgtccacatcctagtcaggtctgaggctctacaggatccgtgctcgaaactagcttgaagcggttttcaccagaaaccacttcaacttgattccacagcgctcgtctcacattttttgctgtccgaatcaccatggtgagggctcctggtcatgccaaggagtatcgagcgaacgcccagctcagcatcacaacttacccccaatccgttgtcgccttatccgctctcactctcgaattcggtcgcacctgcacagttcacccaagaatctccccccaccaaaccactcagcatgaagatctccaccgcgctcgtcgctgccttcgtgaccgtcgcttgcctgttccaatccacctccgccgaaaccgaggccacgacgttcctccgcgtgaacgccaacacccaaggcgccatctgctacaaggcctgcccagcaggacagtactgcccccgaggagaaacaaactgccgcgcccccaccggcgacttgtgcttcaacccggccaccagcctctttcaacacggatgcgacatcggcttcaagtgcaccaacggcaagtgcgtctacaagacgacgccttcgtccgcccacggtcccatttgctacaaggcatgccccacggggcagtactgcgctcgcggagagaccgagtgccgtgccccaacaggagacctgtgcttcaacccggccaccagtctcttccagcacggatgtgatgccggattcaagtgcagccacggcaaatgcgtctacaagaccaccaccaccatcactaccaccgttgccgccgccacctccagtgaagctttacccgcccacgctcccatttgctacaaagcatgcccgacaggacagtattgcccacgcggcgagaccgagtgtcgtgctccgaccggcgacctgtgtttcaaccccgctacgagccttttccagcacggatgcagccgcggcttcaagtgcagccacggcaagtgcgtctaccagtaaagacgagaagagcgggccaaatccgagcacccaagcgaccaagctcgctgatgacaaagcaggcaacgacaactgtcagcttcattaacaactgcgcggcggcgcagtagtcctacacagcaaaagacgacatctactggttacggtacaaacaagcagctccaggcaatacattttgtcgtagctttcgaatcgctgtgttcttgcttatcttctaccttgccatcaccacgcagggcatggtcgcgcgatccattcgtggtaactgaagactgtaagtgtatctgcggacaccgagccaaccggtgaggattgatggtatcttcacttgccaaaaacaatcagaaggataggcttgatcgagcagcaccgccggctcactcaataagtgggctagtaccagtaagtcgatcgcaaggtaggcagacaagagctacatgtgctgtaacctattgttgaaaccgtggatacagcaccggaagtggccctgttccggtgttggtgtcggcgccgtcgtaaagcgccttctcgacagtagaaatcgaatccatcctgcacccccaccaacaaagtgagtattataatcccgaagcgcatatttcatcagtaggaacactgtcatagctacctccctccttttccaccgctcttcacgtccgctcgcggacaccttctccgacggggtcgacgaggtcgacgaggtcagtggcttcaatccacgcccaacaacaacctgcggaaacgactcggaattcgccaagccacttcaaggagcaaacttagctgttctactcattgaacggtgttcaatgatcctgtgcgtaaataggagacggatctcgcgctttatgtttcagtgcacgagtcttgtcttcgctgtgagtgctgtgtttcaactcagacggcagcggtcagtgtttgcactgcaacttttgcagtcgtgagacgcgaaaatgtagcggctgcgagagatttgcacagcagctcaaggcttgagcttttcgccactggcaagtagccaagttgccaggatcatcggaggcgagcctgtgactgagtcagtccctgatttatctctcgcatcacatctaactcgcgctcgcgcaacgagccttcaccttgtctgaatatggacgagatgctgcgcacgtgcagcgagaagatcgctaaagttgtcaaactgtcacgccactggtgacggcactgcagccccaatcaattgacgaaacgagcatgatgcagggttcaaatggacagtattattgtcgtaatatgggcacaagaagggagactacagcaggagggggcgctgcctcttggatcatagggctcgcttaggcgtagacacacttgccgttgctgcacttgaagccgcggtcgcagccgttggccaggaagaggctcgtggccgggttgaagcactgcttgcccgtgggggcacggcaggcgttctcgccacgcgggcagtactggcccgtggggcacgccttgtagcagatcgcgccgttggggctctgctcggtgtgcacgcggaggtgcacggaggcctgctcctcggcggccgagggctgcagcaggcacacgacggcgacgacggcggcggtgaagacggtcgagaacttcatggtattgactgggggaagaggaggaggaggagggagactggggacttgagaggcgaatccggaagtgagccgataaatcagtgcgtgcacaaagagcgctgcaaggctttcaaatcagtggctcggcgatactcaagtcaagacctcggatcggatactgagatcaagatgttgcaggtcatgtgggttcactacgaggactgagatgcgggtgccttggggcccgtcgccaatgtagcggcattgattgagacggctattgagaacactttgatgttcacagttgcagacgtagcggacttgaaagctcgcgatcactatggcctttgatgaagccgctgcggctacgacttctggagttatttgagtcttgaaaaaaggatactttccaaaaatagaagatactggtgcagagacgatcctgttttggatttaaaaccccgatataatgaccatagtgacctttttatcaaatcaggtgctcattctggtagtgcgcaattgaggattgtcgatgtagttgccgcgagctgcacgcagtcatgccccaggctttcctctcttccttcgtgtgtggtaagttgtgtgtgaagtgtttctgatgtgtcttgtcgaaatggcttgcaccggaagcttgaaaatagaatcgagcggtggattctcccccgccgtctcagttcggcatatccgcggcaacagcaacggcggcaacagcaaacggcgaaatcgtcacgcgctgctccaccggaaatgccgctaacacgtcctctctccaccgacagctcaagaatgccgcctgatttgaccggagaggacggaggaataactgcaccggagtgcggcgcatggggtcgacaatacaggcttccttaccgtgctctttcggcggggtattgcccgagcgcgacgggagcgtcgctgggcggttaggcagagcgaacggcttctttgcgatgctcgtggccgctcgaacccaccttcgtctcaagtgcctgacgtcgccgccgaatcccagcaccaccgcagatacgctacgctgccctcagccagcgtgcgtgcggcactgacaagtcgccagttgcagtgaatgccgccggctggaagtgggtgcccagctgccgcaaagtgtagctacacttcaacaagcgtttcggaggttctggcgatccccgcttcggccaagcgcgtacgaacggaaaatcggccccggtatcccatgtacagcgagggttcttctgcgggggctcgtcatcatctctcgcttgggtaaacctgggcggcgctgcccgagtgataatccacgcggagaagactgcgatatgcaacaggcagccgcggcggaaggtgaagtgaataaaatagagggtaaaacggcggcgcgccggatttcctcttgggctcagtatggaacagtccctccgcttgtctatccaacggtcttccaaaggcaacccagctgttctctgcattcgccgttcggctcagccgccattacccaaagcaagcctcaagccccacctcagcttcactttactacactacactacacaacacgcccagcatgacccgccgaccatccccaagcagcagcagccacagcatcatccgccggcgccacacaggcactggcctgagcgcgtccacgccgcccggtgtcggcgccgcctcggccgccaagaaccgccgcttcagcctcgaccagagcgccgtctcgtccgtcgtctactgcgagggctacgcgcgcatcaagcgccgcaacgtgctgacctggaacacgcgcttcctcgtgctcagcgacacggagctgctggtcttccagaacaagcaggacgccagctaccgccgcaacgtgctcgagacgctcgagctcgcgagcggccgcgtgggccccaagacggacttgggcatcgagttcacgttcgcggacggccgcgagatgctcggccgcgttttcagccgcgcggaccaggcgcagtgggtctcggccttctaccagctggccatgcgcagcgaggtgcggcgcgtcaagagcgcctccatggaggagcagggcgaggtcgagaagcgccgcgtttcgttcttcggcagcgtgctcgtgcgcaccatcccgacggtgcccgacgaccaggtgcccgagctcttctacagcaagaaggacgtcgagaagttctcggagcaggcctcgagtctgcgcagccgcacgggcgacgccgtgtcgctcgtgttccgcaagcccacgctgccgtggcgccgccaggtcgtgtaagtaagggcagcggatactcacgcccctattcaagcgtcatgtggtcaaccgggagctacacacacgcccagccagacccgagagtccctctatttattagcagccgcgctccgttggggagagcgcgcgcaccgtgtatcctgtggtagtcctgcctgttataagaccattacaatcgttacacatttctgcatgcttcactccgcggtctgcttggttcccgtacgcggcggtgccgccagccggcctcgccggacgagatcggagcgacggctcggagaacagccgcatcggaaatattgccgtgagagacgcgctgcatgtggctccgagcggaagtgctggaggcgcacatgcagcagacagccacggtacagtaccggtatgaagcaagaagccggaagagcgaagtttgagtgcagtgtctggcggcgtgcgggtctcgccacgtcgtgtagccgcagcgcgctgccttggtgcggacaagacgagctgccgtggaggctccttgttgacgacgccgagctcgtcatggaacgcctcccccggctatccgccggtgccccaagctgtccggacgagctctcgatcgggggctgtgctccgcatggaacggccgagggcaagaagcgcatttgtggcctcggtccgccatgcggtggtcaagcgagtttcgagctcttctggacacgccaacagcgcccggctcgtgcacgaacagggacaattatttccgatcgcagcactgtccatccaagtgcatataatacttctgatagtcactactcggaatagtaactacctacgtccgatctcaaatgcccctcaccgttcaaagttcagcttttcgaccaagtctccgtgtgacaagcacaggccgtccgtcgtctgttgcttggttgctcgcctcggacttgctcattccccgacttgccctcccgcgctcattcggaaatcaaccagccacttcactacaccccgtcgacgctgcagtatctagccatgaagttcttcagctgcctcgctctggtcgtgctggcactcacggccgccgcagtctccgccagcgccccggaggagaccggcgtcaaggcccgccacatgctggcaatgggcgacgagtccgtcatgttcgcgcgcggctcgctgcgccgagaggaggagacggactagagagaatcgtcccagaacctcaggatgcagcggtgatgcagagctagacaccccacgcgagcgggacgcagagccgccgccactgcacaacgtcgagaagaagaagaagccacttcgagacaagcaaaagcagtcgctactgcacgatatgagcccgacaagctgtaacctacttaatcttattgctcgcatccgtggcatccacaccgctcgctctttcggcctgctcctttccgtttggggtggcagattgcttattcgtcgtctcgtgagcgtgcttatcatgataggtctggcgcggagcagagagcttggagtatgtcgacatgttggttggagtacgattgtgtccatcgtggtgccagttgctcctgcttttcattgcggcgagctgtgctcatcgaaaagctgggccccagttcagacaagaacagatccgctcagtcttaactatcttatgtagttcacgctgataagagtagcggtggcttgaacctaacgcaagctgtagcttagctaaatcctgagcgtgatcgccacaagtacttcgtcgagacccagcatgcaccgtagaccgcacggtcgagccgagcctagtgtcgaaatcgtacgatcgcttatttcgcgatcgagtctcggtccgcctcgagcactgcccggcagcaacgccaagagacgttgaaggttgctgctctcagccctttcaacctgtcgcttccttcagtccatcaggctcccggctgcgagcgccgagcccagctgccgctgtcaaaaccacaaacagcgaaaccttgaccgtcagtgcgccttgtcgatgcggccttttcgactcgacgttgcgggagtggttagagcaaccataagtatggttgcttttagccattctgagacatgtatggctgcttttagggatttcaaaaattacgagcgtaatttaaatgtctaaattaccattaagcccttaggtacgcaaatcacgctaaagtgcgcttctgattaggtacgatatcattaagtgcgccacctcacagccgctcattttaagaatcgcgctgctgaacggaggccacgtggggcacgcacctctcgcgaatgagtcaagcaccaaacggcgaggggggaccgatggctcctgcggggggagccattataaacggtaatcagtatgctccatgttggtggcaacgagagtatctacgtgcctcacattttgtttgaattctgtcggtacgtattgtttaggccgaaagctgcggaacgtaaacgaggagctaaactacatgtacgccgctctcgggattgaaaaagacgacgacgaagacgaagactttgttctggatgaggaggatgaggaggacaacggcgacgaagaggcggaggattgctaccaagaggaggaagacgaagaagaggtcgatgatgacgaggagagcgatcgcgatgaagaggagggtgacgacgatgaagaggaggcgagtgacgaggaacaggaggcagacgacggagaatccagcacagaagacgaagcagaagcgagtaagactcgtttggattattgttgatactttttgagttgaactgataatgtattgtgtatttttttagtttgtttagaacgcaggacacgcaaacagagccccgagccgagaaagaaagccacagcacgcaagaaaacaccaggtattctcgttaaagttgctttaagcaaaaagattgcgctatcattaatattgacattcactttggaatcgatagataccgctctggccaaatgcaagctttctgctggggtgaagcccaatctttcgcgaaaaagcgtaaggcggagctgcagcttcacgagtctgtcgacgctgattcgaccccacgtttatccaagcggaacaagcagtacataccgcggaagcgatcaagcaagcaccttgacgagttgcgggagatcaacgaggagcgcgaagaaattatcaaccccgttccgccctttaccccagcgattatcaagagttggagcaagttcaacgcacacaagcagaagcaccacctcaagtttggagtacgaagctcggacacgaaatcagtacaacaggtatgtgtgacctctgtttgatgagaaatttatgttattaaccaaaccccctttcatatgcagcaatcatcgggaccaaatccctccacgttttaattggagtcacaaggtcttccgctgtacacacggtgtttcgcaagcgtcgcgctccaagggacatcgcaatagaaaaggcaactattgcgggtgtcctgcacgcatgacactaaccgttcagcggatggaaaaaggcaaatttcgaattgtcataagaaacgaagtatctgccttttcgtgtatttgtttgctttgttagtatttctcacatgtcgctgttgataatcagaactttacccacacgcacccgaccacgcgaacgcaagcatcgttgtacctgacaacaaagacacttccgttggacgagcaagatctcggagatgttaagactttaacggatgctagtgtttcttccaagcacatcacgaacttcctgaatgagagaatcggtgcgtagttttatatatgatatgctgaagtgatacttacgttactgttcgcgctttgtgtgtttcctaggctgcaaaataacacctcaacagacccgtaatctgatccgcagtattatggggcacgaagcagcggaggcccgtttgaaagacacgctacaagctatccgccagttagacggtagtgacgtccttgctattcaagaccaaatggacgtgacatgcggtatcgtgatgcaaacaaaggtgcagaagttgatgttcgagcgctggggcgacactcttacgatggatttcactcacggcacgaacaatttgggctatcacttgggtgcgtatgagttgttcggtatagcaacttcatatttgttacggcaaccttgcgtagttatagcaaccatatcgatgatatagcaaccttattaacaaagtaattttctactgttgtgtgttggatatttcagggagtctggtcgtcacaactgctactgctagagggttcccagttgtagacttcatatgcctcaaccaacgagctccaatgatgacaacaatcctggagtattttcaagagaagaacccaagttggcggatgatatcctccatcgtgatcgacaaagatttcgttgagtggagggtgctgaaaacactatttcctgctgcgaaagttttactttgtcaattccatgccatttcgtactggaagaaggtgatgcagcgggccccatacaagctgaaggtgtctgaacgcgacgagttactcaacccgatgataaaaacgctgtacaggtacgcaacaggttctatttatgattcttgtggtaacgctaactttggaaaacaaaccatatgcagctccacagagacaggttacgattctagttacggtgcattgaagcaatactgcgaagacaacaagaaacaagctttattctcgtactttgaaaagaactgggattcgtgtcgcgacatgtgggcgaactttgctcgcagcaaatttttcacggctgggaatactacaacgaacaggatcgagtcaaactggaatcaagtgaaaatactgttggggcataagacacgaattgacaagactattgcgggcttggtgcagcatcaaatcatgataactcagcagatcgggttcgtcatcgcgcagtaccattcgacttcgcccgttcctaaaaccataccgatgtttctccggacggtagcaactcgactgtaccctgacatcttcgagaaagtgagaaaagagtgggaacgatttgtgaacttcatggcagacgcgacttgtgagcgtacagcgtcgagtccttcacaatggaaaatttattgcgggaatcaaacctttcgctgtcacgatgtggagtggacgtgtacttgtctattttatagcagtcaccatttaccatgtcgtcatcttatgcacttagcacgcgaggggcatggcttcaaactgcttccagctatggcaattcatgatcggtggagtacgtaccaggccttggaagtgaaaaacgaattgacggctgcagcggaaatgttacagccaattgtgcagatgtccaagttaaggttgccgaaagtaaagttgccgaacgacactggggctgaaccagaacaaccactttatgctgcggggggtaacgcttcgccaaccaaagctaggaagcaagttgcgtacgtacggctacggcgaggtgaacgggcaaaccaggttgtattgtcttcagctgaaaaatacgcatacgcaaaagcgatgctggaaccgctattggaacacctgtcagatttgtctagtgcagacttctaccaagaactaagcgcctggaaggaaacgatcgacatagggctcaaccgtgtcaaccctgccccccaaccgagttctacagaatctgctgaagatagcaagcaagaagaagatgtatctgaacctgtctcagactccattctggaccccgtggaggcaatggggactatgacgctcatggacgcattggaaagcagccccatgaccatgaattatggcgattacgagtccgacgaaagtatgttaccgacacaacgcactcacctttcgcagtcatctccaattcgacccccatcgacgagaaatctcatgacagctgcggaatgagtagctgtgacaaggtttcaagctctacgaagcctgacacagagtcgcgcgtgggccaggtcgatgtcattagagttcctaagccaccaagccaaggaaagtcaaggtcaactccgaaacagctgaggcaaactacgatcagtctcaaagccgaccgtcttgctgttcacaagtaccccactgaactcgccgtggctttggatcagttcctgatttgggccagaaacacctcaaatctgaagcgcgtgatggagatgctgtcgaagtatcctgttcagctggaggatgcctatctaagagctcggaagattgattgtcattgggaaattgtacgacctgcggactacatgcacacatttgtaattccacaagacctcgccctatgaatgcaggcagcaacgactactacccggaaggagaagcagccaattgtactggatgaaaaggccaagaagcaaggacttgctctcgacgtcgtcttggcgattgatccaaaactgtggaaatttagcgggtatggttgctttagcgatatggttgctttaattgggctgctttaacatgcttatgtttctagacaatatgtaggtgctctaacaggattctacgcgatcaaggcgaagtgtacctcatggttgaaggaccgaaagtggctggagcaagattggcgtaaagttgactccatcgtggatcttttcgctgcggagacagcaactgcaggactaccgcgtgatgctgttcccgagcggcaccaaggtctagcgaacgaaattatctcaaagtttacttcaagtcggctacgcactgaatttgtgacgctctccaacaaagtcctgatcagctttgacaacatcgtgggagggatctgtcgtggatggctaaatgatagccctgtggacttttgcttggagacccttgcgagatcggtggggaagtgccatgtgctgtcatcactgacatgggctatcggatggccaagtctccctaagacagcacttgcagcaacgaattttattatccaccccgttaatctgcacgcagaccactggggggtaattatccttcgcctacgctacacggcaaaaacaagcaagcttcgggtgcatgtttacatgtacgagccgctcattgatgatgactatcaccatgaaatggaaatcgtgtggactggaattccgaaagacaaagaaaatgaaggaaaggaggggcttcgtggttatgtggagcgggcacaaggcttctgacccccgtggccatcttttcttcgatccgattgagtggatctgtgccactcaacaacctgattttgctagctgtggtgtaatggtagtagcccaagcccacagctatcttacggggaacttgcagatgcaactttctagaatttccaagaacgacgtcaaggtgatgcgattgaaaatgctgtgggtcatcatgtgttactcccaagaacgtcatctctctgaacgcgacgtcgctaaagatagccagattcatcagcagctacagaaccagctctgagaaacaccacaatctgtatttacctttaaatacagagtctatgctgcattagtctttcatttttcgcaccgccagctccagtagaacatcgagggaaacagcgccgtcctctgcggtgagaccaccttggtcggccccttcatcgcccaagacggctgctaacgcatagctgttctcttcgcgatcttcgacgggggcttggatttgtagctgcgctgccagaagcttttccagatgctcggtaagctcatccagcttcttcttgaggagtgcaatctcggcgattctcgcgcgcaccagctcatgtgccagcgatttcttctccatttttgctgtcgctcaaactctgctaagtgttgaaaatgtgggacacatattgtcatgtgtttcacgtattgctgtgttgagaacatcagttagacgccaccacgacgtgtctaaatttagagatatatgtagcaagaccatgacgagggcgacgtgtccctgtcatttacgcgtcatttaaaataaattaccgggtgccagctggttttagggttgctttaggccttgtggttgctttaatttctgtcgtgttgtcgtcatatggttgctgtagcgccattccgaagttgcagcgtttgccactctcgccggtcacggctgttgactcaatcaaatcgtatgaaccgcttgtcttggcccagcattcgcagttttggccgccgagttccgccttggctcgtttaatctctctgacgctgcaacaaaacgacaaaaaagctcactttgaccaagtgggaatgtagcgaaacattccgtgtattctattggctgaaattatccaccgagacctcgttcattgggtataactattttgctaccgactgagctgaagaaggtgagcggagattccgctgcggaacgaggagcgtagcgcggcgagcatagcaagcggagtgggccaagcatcctaaagcgccgccacgtgcggcggcgctctgttattttgcacttcaaacggcaaaacgggaggaatcgtgtccctacgcgcgctacgctgccgcttgtggctctgtcgtgtgtttcctagggacagatgctgcaagggaaagctgctgaagcgaggctgggtactgtacgtgtcgaaagagagctcaaacgatagtgaaacaccggtgcttgccaatgttacggcgccccagatggagcccgtgaagcgctgcgacggacaatatctgcgatcggacgaacagcggacagtaggcaaccaccttgttgccctcttttgaggcgagacttgttggccttcctcctgttcattttccaattggccttctccagccacagtcacatcggctcaagaccaacaaagaatcatgcgtctgtatcacgctctgctcgtcactgcggtcgctctgctggccagcaacgcctccgctggccgtgctgactgcgatatgatccccggcgactacgtcgagtcctccaacggctcggtggagcagggctccacggccaactccgccgtcggtgccagccaggccagccagggctctgctccgtcggacgagaccccggtgcagcagtactccacgaccaactctggtgccagccagcccgcttctgccagcggctcggcccccaaggactccttcgacggctatgacgcttcgaacgactcccctgtccagcagggctcggctgtcggtgccagccaggcaagccagggctctgctccgtcggacgagaccccggtgcagcagtactccacgaccaactctggtgccagccagcccgcttctgccagcggctcggcccccaaggactccttcgacggctatgacgcttcgaacgactcccctgtccagcagggctcggctgtcggtgccagccaggcaagccagggctctgctccgtcggacgagaccccggtgcagcagtactccacgaccaactctggtgccagccagcccgcttctgccagcggctcggcccccaaggactccttcgacggctatgacgcttcgaacgactcccctgtccagcagggctcggctgtcggtgccagccaggcaagccagggctctgctccgtcggacgagaccccggtgcagcagtactccacgaccaactctggtgccagccagcccgcttctgccagcggctcggcccccaaggactccttcgacggctatgacgcttcgaacgactcccctgtccagcagggctcggctgtcggtgccagccaggcaagccagggctccgccccggacactccggtgcagcagtactcgacggccaactcgcagggctccgctccgtcggacgcttcgttcaccagcagctaccccggccccactccggacttccctgagtacggccagggctccgctccggctgacttccctgagtacggccagggttccgctccgacggagtccccggtgcagcagttctccactgctaactctgacgtcggtgccagccaggtgaaccagggctccgctccgtcggaggagacccccgttcagcagggctccgctccaacggacgcttcgttcaccagcagctacgccggccccactccggactttccggagtacggtcagggctccgctccgacggagactccggtgcagcagttctccactgccaactccgacgttggcgccagccaggtgaaccagggctctgctccttcggacaagaccccggtgcagcagtactccactaccaactcggccagccaggcttctgcttcgggttccgacgatgttcagcagggtgttgtggtccctggcggcgatgttgaggatgcctcgcagaagaccgacgttgctggcgagtccgacatcaacttcaagaccaccctggcccctaccgccaccaccgccgcacctgaggtcgctgctagctccagcggctcgagctcttccaactccacggtcactacttccagcaccggtttctgcgctaagccgcgtgttcgcatcacggaggtcgacgttggcgccgccatcgagaacaacgaggaggaggccgccctcaaggttatcgccatcgctgctctgccctcgggcggctctcgcattgccttccagagcggtgacaacgtaatcgttcgtgagctggacgccaacgacaagctggtggccagtagccccgccgtcaaggtgccgatgaacgacttcgccgacatctacgccgacaagaatggcttcgtgatcctcggaacgagagacgctgagggcggcggcaccctcaactgcggtaacccgagcaacctgtgcggtggtggcccgagccccgcttcgccttgctacgacatgtacatggcccgttatgacggcacgagcgagaagtgggccaccaagctcacgtcgtccagtgcttccctgcctccttactcgacgggcaagactggcccggacgtgtacatgatctggtggtacgctcaccacggccgtatcgcgtacgacggcaccaactgggccgcgtacttcggcgctgccatctcgacgtcggagggcggctgcatcaacatccaccagggtgaccgcatgaaggtggtgagcccctcgggctccatcacggacagccaggactcgttcgactggggctgctcgcactcgggctacgagcgcatcacgtacgacgagcgctcgaagagcttcgcgtcgatctgtaagacggacagcaacaaccgcctcatgccgcccaacaactgggacgcgaccatctaccccgtggacctcgctgcctccaacctcggcgacatcgtgtcggactcggtcgcctcgagcaacaagtactggtcggcggtgagcaacggcgacggtgacaacgccaaggtgcacctgatccactacgatctcaagtcgcaggccagcgaggacatcgtgctcggcggcaccgacgccaacgagcgtgctcctcaccttgctgctatgggcaaggacggcatgctcgctatgtgggagggcagctcggctggcggcgacctccaggagggcagcgaccgcacgatctacgcccaggtgctcaaccgcgcgacgggcaaggccatcagcgagaagatcacggtggacaagtcggtggtgggcaaccgctaccaggcgctcaagagctacccggacggcagcgtggcgtacctgtcgaagggcaagacgggcacctcggtgcaggttgtgcgcttcttcggctgctaaacgatcggagattggaatccgatacactctttgaatgtatagactctgtgtagatgttcgcaggccactagccccattaatacacgccttcgatgttgaagcttgctaacatggctacactgcaaccgttccacaacacgtcgggtctaaatcttgtggcgcacactgtagccgtactacagtcgatctctaagtcgcaagcgcaccaatatctttaagtaccccgttaaatcggatcaagagtaagggcagtataaaagctaaaactgtttcacgagttttgattccttctctaatcgctttaaccattgtactacgctaatggaggagaacaactgtagcacagccggcgttggcgttgaagttttgatccgcgcacgcagtttcgtatcgacgccgcactagcgagatgtcggtgcttgtgcgcacgcagcccaaggcggcggtgtacgtggcggcgacgcggcagcacgtgggcaagaccagcacgtgcctgggcctgctgcagggcctcaccgttcgcctggaccgcatcggcttcctcaagcccgtgggacaggagagcgtcgccgtcgagggcggctccttgcgggtggacaaagatgtcgcggtggcgaaaggtaggcgagcaatcttgtgcgggttatggcggctggtgtatataataattattgtggattgcagaggtgttcaagctggacacgtgcaactacgcggacatgtcccccgtggtgatcatgcccgggtacaccaagcgcttcctggacggacacatcacggtggagagccaattggacaagatccgccggagcttcgacaagatcacggcggccaatgaggtactgtagaatagggaatggtggtgaatcttcgaggtgttgggctaatgtgcttttggctttcagttcactgtggtggaaggcacaggacacactggcgtgggctccattgtgcaatgcaacaacgctaggatagctgccgagctgggtgtggatatggtgctggtggccaatggagggctgggctcggcgttcgacgatctggcactcaactacgccatgtgcaaggcgcacggcgtgaagatccgcggcgttattttgaacaaggtgctggaggacaggaccgatatgctgcgcgagtacttccccaaggcgatgaagcactggggaggcgacgtgccgctcattggcgtcgtgcccaacttgccggcgctctcgaacccgagcatgctggactttgaagggctgttcaggacgacgatgctgacggaccgatcgaagcgcttccagcagtacaacaagaccacgctcgtgacggcaggactgcgtcggtttttagcgaagctgactgctcccgagttcgagaacacgctgttcgtgacgcatgtgtcccgcaatgatattatcctggggttcctctctcacgcgcagaacttcgagctcacaatgaagaggccgtacggcggtggactcatactcacaggatcgccctccggtgaccagccgcaggactacattataaacatcatcaagaacgcgacagctcccgtgctctacgtgcccatgaccaccttcgcggccatggagaagatcacacacttcactggtacgtccagcaagctatttcttgttcctagctttgaatgctgacgctatcggctatttggttttgcccgcagccaagtttaatccgaccgacgaacagaaggtgcgcgcgtgcgggaagcactacgcccaccacatcgactttgacgcgattatctccagatagacacacagcctcggaactagattacgacgggcaggggcacggtagagctctcgagctcggaaaaagacggagaacttcacctttttatccgaaaacgattcaatccgaacggtggcggaaactttttgcaaatcatcgggcagtacttcgggtatgacctataatacccatgtcgctctcgaaacacgccaggaaaggtacttccacagacgtgtcaggcaatggcagtttcgatacggcatttttttctcttcgttccgcacagagcgaatgtacggatgctgcctcactattcaaaagatcgtcgaaaagctgtgcagcaagcaatcgtattttctaaatgcccccgtacatcgtgtccgtggagaggtgctcgcagtgaacgttttatctaaaacccacgattcgtggtgtttgtgccgcactactgtacatataatgccactagccagcgtctactcatttgacagtgcaattctgcgggcgctactgtacgtgcacaggatacgtcgttccatagctctgcaggtcgatgtaccggtacctacacgacgagttcgatgcagcgaataaatagcgggacgcaacgggtggaaacagcgaagcacactgcaaggtggacgccgagccgttcccgcatgttgcattcctcccttgttgtccaagatccttcggacaccaacagaagaatcgcaggagctcttgacatatccttcaggtagaatagaggtttaccccagctgggtctacagacgccagctgccggaagcaaaccacaaacagcgaaaaacttgacatctccagtctctagtcactttgagttggcagcataaaatccattcgttgcattgttgcttgaagggttttcacgagcctgcagcgcttgcagctcctcgtggagggattgcaagatgtcagttgacacgcaggagctgagagccacaagagctcgatggcgaccagtccaagcatcaatgcttcgttgaactgaggttgcacatcgtgcatcgtgacatcaaaagcacacgacgagcggctctctttctctccagcaggacgcagcggacgagcgtcacgcttccatcatctgtcgtgacgttaactgcgcgcatatgctgcggccgaaccgtattgcctgagtgcggcagccaacatagagagcatggaaaagcaacctagcagcagggtacgccactgctacatctgctcgtcctgaagcgcgtggcggccccgcatggatgaacgctcctgcactccctgccatggtggaccccttcaggctgttcgaactccatgcacatgtagtgtaaaggaattccttggtctacttcgtcttcattttccaattggccttcgatcagccacaaccacatcggctcaagcaagacccgcacacaagttaccatgcgtctgtacaccgtcctactcgccaccgctgccgcgatgctcgccagcaacgctgcggccgacaaatgcactattgtcaccaaggcgccggctgtcacgaccgcgcccactggctcatacgacgcgtccagcggatctgcagtgacccaggactccactgccgcctcggccgttgacgccagccaggcttcgaacgccgacgacacgaaccagggcgttacccagacctctggctcggatgctccgtccagcgacgacgacaccgaacagacttctggctcgggagctccgtccagcgataacgcatcccagaacaccgacgttgctgcctcctcggacactgccggcgaggcggacaccggcgtcgacttcacggccaccccgaccgcaactactctcgcccctactgttgcctccagctccagcggctcactcgccagctctagctccagctctgcttcggtccctactacgtcgagcaactccacggctacctccaccacctccggcgacaactcgaagctttgcgccaagccgcgcgtggttgtcacggaggttgatgtcggcgccactgtcgagaacaacgaggaggaggccgccctcaaggttatcgccatcgctgctctgccctcaggtggctcgcgcattgccttccagagtggtgacaacgtaatcgttcgcgagctggacgccaacgacaagctggtggccagcagccccgccgtcaaggtgccgatgaacgactttgccgacatctacgccgacaagaacggcttcgttatcctcggaacgagagacgctgagggcggcggcaccctcaactgcggtaaccccagcaacctgtgcggttcggcacctagcccggcggttccctgctatgacatgtacatggcccgttacgacggcgcgagcgagaagtgggccaccaagctcacgtcatccagcgcttcgctgcctccttactcgtcgtcggccagcggcccggacgtgtacatgatctggtggtacgctcaccacggccgcattgcattcgacggtaccaactgggccgcgtacttcggcgctgccatctcgacgtcggagggcggctgcatcaacatccaccagggcgaccgcatgaaggttgtgaacccgtccggcaagatcgcggacaacaaggactcgttcgactggggctgctcgcactcgggctacgagcgtattacgttcgacaaccgcaccaacagctttgccacgatctgcaaaaccgacagcaacaaccgcctcatgccaccgaacaactgggatgtgacggtctaccccgtgaacctggctgctgccgacctcggtgacattgtcccggacggagactcttccagcaacaagtactggtcgactgtgagcaacggcgacggcgacaacgccaaggtgcacctgatccactacgacctcaagtcgaaggccagcgaggacattgtcctgggcggcaccgacgccaacgagcgcgctcctcacctcgcccccatcggcaacgacggtatgctcgctatgtgggagggcagctcgtcgggtggtgacctccaggagggtggtgaccgcacgatctacgcccaggtgcttgaccgtgctacgggcaaggccatcagcgagaagatcacggtggacaagtcggtggtgggcaaccgctaccaggccctcaagagctacccggacggcagcgtggcgtacctgtcgaagggcaagaccgacacgtcggtgcaggttgcgcgcttcttcggctgctaaaaaactagatgttgggtacaaacagagtttagagagatgtgagtgagtagtgtggtagatgtgaatgcacagtgcatcaaaagatccaaaattacatgagcgagtaccctatcaaaccgtttgagtagcagtagcagtagcagcgagcgtgttccagcgctccaccaccagcaacacagcgttcacctccttcacaatagcgtcagctgcagcatactgctccgcgtcctcctccgacaagtccgctcgcgtcaaggcgtcgggcttgatccacctcgcgttcacccagatagtgcgcaggcccgcgcgtttggctccttccacgtcgcactcgtagtggtcgccgacatggacaaggtgctggcgactgtacgaggccgggaacttggccaccgcggcgtcgaagatggccgcgctaggtttagccgagcccacgagctcggccgagatcatgaagttcacgtggtcctggaagtacttgggcaggctgtccatggcgcaattgccgttggtgatgacgcccagcacggggccggcggccacagcgccgctagagcgcttgatctcaagctcgaggcctcggagcaagccctcgacgccgtcgaacagctccggccggctgcgcggctccaggaaggcgcggaaggcggtctccacgaaggcctcgagctgcgcctggtcctgcacgcgcaggttctgcgcgccgcacgccttcacgcagtggcgcagcgtgtgcttgcgcaggaacgtgtagtcgtgcgcctgggccggcagagcgcgctggaactcgaccaacagcgcgtcgaacgccgccgggggaaactgcgccgccagctgtggcgtctgctgcgccaggaacgcgtggaaggcctcgctggccttgcggatcaccgtcctgccgcaccacagcgtgtcgtccaggtcgaaggtcacgccgcgcacggccgcgccggctggagattcggtcgccaccatttcgtgttcgttcatgttcggatcaaaggaaaatgtagtgtgcgccacatcgtttggtgggggagagtcgattagcgagcggttcctgcgaatatgttctcccagagcctgctcattgtaggatgctgtccattccctgagtggattgctgccccagactgtcttattcgtccgtagagctacagcctgtagcctattgaacacctcaagatgcagagcttgcaatacgatactttccgtgaattcctgaaaacattttacccggtcggcgtacaggcggatgtatgtaaagccttgcagcgctgacgatgtgggcacccggagggtcgacagcagaagataaagtttttctaacgattgtaccgtacaagtcgttgttccattgatttagtttcgttcaaaacctcatctacatcctaaacgcatggtcgatcccgacatggtgcgaatctatttgcttttctagcagccgaagaagcgcacgacctgcaccgactggtcggtcttgcccttcgacaggtacgccacgctgccgtccgggaaggacttgagggcctggtagcggttgcccaccaccgacttgtcaaccgtgaccttctggctcagagccttgcccgtggcacggtcaagcacctgagcgaagatcgtgcggtcaccgccctcctggaggtcaccgccagccgagctgccctcccacatagccagcatgccgttcttgcccattgcagcaaggtgaggagcacgctcgttgcggctcgtgccaccgaggacaatgtcctggctggccttcgacttgaggtcgtggtggagcaggtgcaccttggcgttgtcgccgttgccgttgctcacagtagaccagtacttgccgctcgaggcgaccgagtccggcacgatgtcgccgaggttggaggcagcgaggtccacggggtagatggtcgcgtcccagttgttgggcggcatgaggcggttgttgctgtccgtcttacagatcgacgcgaagctgtgagtgcggttgtcgtacgtgatacgctcgtagcccgagtgcgagcagccccagtcgaacgagtccttgttgttcgtgatggcaccagccgggctcaccaccttcatgcggtcaccctggtggatgttgatgcagccgccctccgacgtcgagacggcagcgccgaagtacgcggcccagttggtgccgtcgaacgcgatacggccgtggtgagcgtaccaccagatcatgtacacatccgggccgttcttgcccgacgagtaaggcggcagcgccttgctggacgacgtaagcttcgtggaccatttctgggcggcgccatcgtagcgcgtcaggtacatgtcgtagcagggcacaggcgggttgggagccgagccacaaaggttgctcgggttaccgcactggagggtgccgccaccctgggcggccttcgttccgaggatcacgaaaccgtttttgtcggcgtggatgtcaccgaagtcgtgcagcggcaccttgacggcggggctgctggtcaccagcttgtcgttggcgtccagctcgcgcacaatgatgttgccgccgctatggaaggcgatgcgggagccgcccgagggcagagccgagatggccacgaccttgaggttcacctcgtcctcgttggcgtccacagcagcgcccacgttgacctccgtgatgcgcacgcgcggcttggcacagaagcccgtgctggacttggccgtcgtggtggccgtcgtggtggcggtggtggtggtggtggtgccggcagcgtcaatgccagtgcacaccgcgaagaacgcgaccgtggtggccatgagagcgtggtacagacgcatggttggtggttgcttgggttgcactgggaggggcttcggtggcgcggggcaagttcggaagtgagaaggagctgatggcggtggagattttagcggtcacttgagttggcgcatggcttgcgctgttggagcgtccgatcggtgggatcacagcaggaaagataaccagacgacagatggagtgtcgtacccttgacgacaccctggtgttgcgccgcgcttcagcgattccgagtcggcgcttgtggggtttgctgacttggccggttatgtggacaacagaaggaagccgaaagacaggcatcgcgcactccctgtatcatagatacacagtacatgtaggggcgatcggttcgagcggccatacaccgagcttccaaattctgtagaggttctactgcaccggcagaggtcctatttgagagacaatgttgtggtccagttgtgtagatgcttgtactgacacaagtaccagtatacgtgcctgtagcagactgtaataagctccagccgcaacatgttcatgaaacaatgacctcactgacacgcgactgtcgcgatcattgaagtgcgcgctcaatgtgtcgaccggctgaaagcggtttatgcagaccccatcaacgtctggcagcaatcgtcttgctgtttgtggtgaccgcggggttccgagtttccacctggttgatatgcgtcgaattgtgataactctgtaattagagcctgatggtatgtttctctaccaaaggccgtacaggacttttatactgtactagctcgcagccccgcagcacctgcttgaactccccagcaggaagcaggatcggtcagagtgcagcacatggcctgctgtgtctgttacaacgaacgtttgcacgtcgatccaagagcagagtaaacgcgctgttgagcgtaagctgccatggatgccagctctccaacatggatattattctttgccgcaggctctctcccaaattcgtatccgtgcactttgaaccatgcttcttcttgaatactgaatgatatattgcattatttattttcaaagatcgtttctaatcaagttaacaacacaatggttttgagcgcgtcatagatgtaggcatggttgtcttcattgagttattcatgcactgacgaggcccaccgtgcgcttataagcatataacgctaaccgagaaaactataacatgcagaaaacagatcttctccggtcgagacgcccgccatttactacttcgcgaagcaaggcgcccagtattgggtgcacataatttcacggcgctagtcgtgttcgcacgagcactacgagagagagagagagagagagagagagagaaggtagtctatttaactttaggtgttagcttccttgtataatctcaagtcgttttactagcgccatctccttgtggtggagccatggtgctgggggtggagtggagtgggttcgtctggtcggggagcttcactgtgcatggcgttgaaacacacgaacattaactataaacttagtagtagtagtacttaagtagtagctaactgacgtttgtaaactgtttattagtctacatagagaatctggctaacaagattgcggagttagacgggttttagtcattcatcttgaggctcgtttttagttgccgaacggtaacttccacgagttctcttctacaccaataatgatgcccttatatcgacttactctggctgctccgtggtgcgcatcagaggtcggaaaataaaatatcatattgtattttggttttggggtcgcagtaataatcattgcaatacagggtcagccaataatacagtattttcacaattattggcaataaatatatacgggggttttgtagtaagcttagtttttgtattggcgcaagtgttgatattgtattgggacaattttccattgtacgggagcaccctaaagcaataataaattattccgtgctaaaaatgccgtaactattgtattgatattattttttccaacccctggtgcgcatacgtgggatatggattcaacacaatcggtctcaatgcggttaagcagccatgtatttgaacactacagagcagcaaacatacaaacgcttttgcaaacagcacttacagtgagttcgtgttttgtgagtatcactagcacgtttacggagaacactaaacacaagtatcgcctaaaggacgtcatttatcccaatagacttttcattgtttgaacactatcgaatacgaaggaataatggtgatcttaccagcagcgtggatactcgtagtggtcgcaagtccggcggccctatccttttagttagcactggcgtgggtgggaatgctaacctgccaggtgtggtgtgtcgcaacctgtaggcacttgaaatgccttctgcatcaggaaaacccgtttatcgcccatcgccagctccgcttgctcccttcgataaacatgcaaggccaacaatggagcaccgacagtcgttaactttcttcatcatatgtagcagcgctcaagttctaccaacattcgtgccacaggaatagacttcgagggcggtcaacgtaaggggccgccttgggatatttggttcgccgtgacagcaaacagaagcccaagctgcaggccatcgctcaagctcactcgcagatggagaacgatggcagcggaagtcggcccggacgagggaggagcgccatccagcggccctcagcatttgatcactttttcgacccgcccaccatcgcttggggttgccactcggaaccttcctccacaagcaaggaacctcatgactttgaaccataaccaaaatgaaaaaaagataaccattttgcccaatgcctgtatgcatcattggaaatgtgagcgtaagggagttgttaagaagcatgcatagttccgtcttcgaacaaatagtacaagttgatgcacaacgaatatttggtagaagtcgaaaaagtgcgcgtcctgcatgacgtggcgatcgtccgagtaccgtactattaatagcgcaccagtcccccagtggagtctgccgccatcttgctgatgaactcgagcaagatcgtgcggccactacgatggagggttgtcatggcagtaacttattcatttgagttgaagaagtgctgacatagtaaccttgctgtagcaacacacagtaccaacacacagagacagcaaattccgtagtgctattgtatttttaaatacaattatatcacggaaaataactgattacaacataatatttcaacaatatatactattattattgatgcaataatattgagacagcgttaaacaaaatgatactaagccaccattagagttatcgagataatcgcgtttgaagctgaccaatcaaatttcgtacctaattcgtacctaacaggacatctaaatttgaaagttaaaatcactcgtattaagcagaaaacactctaattcgattgcttttagcacgaactttccggcagtatacaatacgttaatttcggagaaatattgagctcacaagccccaaataaaatccgggatttggggggtccgaaaatggagatattgttttaagaccgacttcactccgcgagttcttaacatttttcatctctcaatagctcaaaagaagcacagaacacggcgctttcgagcggtatgcttaaatcgcgattcgtactttggttgattagtatatttttgtttgaggctgtctcacaaaatatcatattatgatattaaatactatatcgatataagtactttatagtgctatattatttgaaatagtaatatcaaaatcaataatactgttttgttcttgttgtatcgttgtgccgagctctgatccaaacaattacgaccaactggaaacggaatcttttgctcccaatccttgatgtcgacaatagtatagatctgtgtggagcatgtagcccggttgccgtgttgcacccgccgtcagagcatgacatgcattgtattgtacagcacaatttgtacttctacatgtgcatgccctgcatcatacgagtagtttactaccacgttgcttattgttttccatgttatggaaaacaatagttgaattttgcataagccaccaaaacatcatggcagcgttagtactaaaaagcaacgatgaacgcccatacaatgtctagtggcttgttcgcaactacgtcagccagtagagtaccggtaacggcggtacatgcattatcaaaagatacgtgagccttcagtgtccttagacctcggaaaatacagtatcatattgaattgcaaaagttcggtctccataataatcatttcaatatatcattcaccaataatatgtatttatttcaattaattttatatggagattcacgttaattggtttttgtatagttaaacattttactgaaaattgggcttcaataatagtaatttcaatacgaccggcaaccaataatacatatttccgcacacaaatacagtaattgcaatggaataattattttttccgaggcctggtgtccttctgatgctgctaaaccatgccatccgagcacagccacataagctgctcaaattgatgaagtttggtacattaccagggcccctctccaaggtagagcagtccatctgtagtccggttatctgtcctgttgtgatcatatcgacgatgggccatcgtacacacgacagcggaatcatggactgtcccggtcgcaccagattaaagtgtctgataaaaatcttcggtggacagctcccactttccaatttgccccgcgccaccgaagcccctcccacagcaacccaagcatccaccaaccatgcgcctgtaccacgctctcatggccaccaccgtcgccgtcttcgcggtgtgcaccacgggcattgacgctgcgggcaactccaccgccacgacgcccaagtccagcggcggtttctgcgctaagccgcgcgtgcgcatcacggaggtcgacgtgggcgcctctgtggagaacaacgaggaggaggccgccctcaaggtcatcgccatcgcctcgctgccgtcgggcggctctcgcattgccttccagagtggcgagaacgtcatcgtgcgcgaactcgacgccaacgacaagctcgtggccagcagccccgccgtcaaggtgccgctgcacgacttcggtgacatctacgccgacaagaacggcttcgtcatcgtgggcacgcgtgacgccgagggtggaggcaccctcaactgcggtaacccgagcaacctgtgtggcggcggcccgagccccgcttcgccgtgctacgacatgtacatggtgcgctacgatggggcgagcgagaagtgggctacgaagctcacttcgtccagcgcctcgctgccgccgtactcgtcgggcaagactggcccggacgtgtacatgatctggtggtacgctcaccacgcgcgtatcgcgtcggacggcacgaactgggccgcgtacttcggcgctgccatctcgacgtcggagggcggctgcatcaacatccaccagggtgaccgcatgaaggtggtggacccgtctggcaagatcgccgacaacaaggactcgttcgactggggctgctcgcactcgggctacgagcgcatcacgtacgacgagcgctccaagagcttcgcgtcgatctgtaagacggacagcaacaaccgcctcatgccgcccaacaactgggacgcgaccatctaccccgtggacctcgctgcctccaacctcggcgacatcgtgccggactcggtcgcctcgagcaacaagtactggtcggcggtgagcaacggcgacggtgacaacgccaaggtgcacctgatccactacgacctgaagtcgaaggccagcgaggacattgtcctgggcggcaccgacgccaacgagcgcgctcctcacctcgcccccatgggcaaggacggcatgctggctatgtgggagggcagctcggctggcggtgacctccgggagggcggtgaccgcacgatctacgcgcaggtgcttgaccgcgccacgggcaaggccgtcagcgagaagatcacggtggacaagtcggtggtgggcaaccgctaccaggctctcaagagctacccggacggcagcgtggcgtacctgtcgaagggcaagaccgacacgtcggtgcaggtcgtgcgcttcttcggctgctaagcaggaaggtttggtcctgtgtacgggaaacaaacatagatgaaaagtgaaagagctaaattaatggaagtagaaatgtactgagagagataaggccccaaggtgcttgacctagtggcgtatatttaggcactcatttcggagcctgctggaagctggcactttgacgtctaagtgagttaccctaaactattcctagttgatcggtttcccttcctgaggtcgaggtcgtggtgaggcggcggattgaggggatgcggttgctgatgttaatcgggagttccattaggggggtgacttaaggggttccaggggatgtagtgatggaggtagtcgggggtcggaaaatagacttacgtggcgtttgtatcggaatcgctccgggcgagactcgaaccctcagtggaacgcttgatcttcgtgggccttacccacagggacactaggagccccccgaagtagaaatgtactactactaggaaatgtgtttgataattgcgtagtgtttctactacgtagtacgtttgttctaggtaatttagaatcctaaccgtcgcttgaatgacagagatgtgaataactggctctgtgggatacggttggtggctgcaagctagcttcctgttgcgtgtgggccgctggatcgggtagtctgctaggtttagtggggtttctcttcctaaaatgaactctcgttactgagtcggtcagtatattattgccacgaaatcctttaataaattttgcactgtgctgttcatgttgcctaactgtagcggttcgtgctcgcgcctaaacggatgcggtagcaaaacttttagctatctgtctgcccctgcaggaaaccagatgttctttttacgcttctgcaattcgttgcggcccgctttctgcgtacgaatacccacttatttgtagcctagacataccaacatcgcgcacaggctgtgctgtgcggcacagcataaaggctctacactcgatttctttcgcatcacagatctacactacaataaaaaagtgtagtgtatagggtatacagtatacatgagatacgtcatcatgacgttatcaaatactcaaagtgcgagtgggatcaacgcaacaatggtcaatgaacctgagtactgtacctaaaattcccgcaaaccacttcttcacaggcggatttgagtgacctccacaaattatccttttctgcagcgcacgtcgccccacccgaaaaatcgtcttcgatgcgctcttgctggcaaaaggcgaagtctttacaaaccaactatcaaacacatttcctagtagtagtacatttctacttccattaatttagctctttcacttttcatctatgcttgtttcccgtacacaggaccaaaccttcctgcttagcagccgaagaagcgcacgacctgcaccgacgtgtcggtcttgcccttcgacaggtacgccacgctgccgtccgggtagctcttgagagcctggtagcggttgcccaccaccgacttgtccaccgtgatcttctcgctgacggccttgcccgtggcgcggtcaagcacctgcgcgtagatcgtgcggtcaccgccctcccggaggtcaccgccagccgagctgccctcccacatagccagcatgccgtccttgcccatgggggcgaggtgaggagcgcgctcgttggcgtcggtgccgccgagcacgatgtcctcgctggcctgcgacttgagatcgtagtggatcaggtgcaccttggcgttgtcaccgtcgccgttgctcaccgccgaccagtacttgttgctcgaggcgaccgagtccggcacgatgtcgccgaggttggaggcagcgaggtccacggggtagatggtcgcgtcccagttgttgggcggcatcaggcggttgttgctgtccgtcttacagatcgacgcgaagctcttggagcgctcgtcgtacgtgatgcgctcgtagcccgagtgcgagcagccccagtcgaacgagtccttgctgtccgtgatggagcccgaggggctcaccaccttcatgcggtcgccctggtggatgttgatgcagccgccctccgacgtcgagatggcagcgccgaagtacgcggcccagttcgtgccgtccgacgcgatacgcgcgtggtgagcgtaccaccagatcatgtacacgtccgggccagtcttgcccgacgagtacggcggcagcgaggcgctggacgaagtgagcttcgtagcccacttctcgctcgccccatcgtagcgcaccatgtacatgtcgtagcacggcgaagcggggctcgggccgccgccacacaggttgctcgggttaccgcagttgagggtgcctccaccctcggcgtcacgcgtgcccacgatgacgaagccgttcttgtcggcgtagatgtcaccgaagtcgtgcagcggcaccttgacggcggggctgctggccacgagcttgtcgttggcgtcgagttcgcgcacgatgacgttctcgccactctggaaggcaatgcgagagccgcccgacggcagcgaggcgatggcgatgaccttgagggcggcctcctcctcgttgttctccacagaggcgcccacgtcgacctccgtgatgcgcacgcgcggcttagcgcagaaaccgccgctggacttgggcgtcgtggcggtggagttgcccgcagcgtcaatgcccgtggtgcacaccgcgaagacggcgacggtggtggccatgagagcgtggtacaggcgcatggttggtggatgcttgggttgctctgggaggggcttcggcggcgcggggcaaattgggaagtgagagagtggcacaccgaagacttttaatcagacactttaatcttgtccaacttggaactgcaagggtctgctgttcgtgtctacgatgagatcgcagcaggaaagataaccagactccagatggagtgtcgtaccttcgccggagccctggtaatgcaccaagcttcatcaattggatgtcggcttttgtggctgcgctagactggcgtgtctagcagaaacagaaggacactgaaggctcacgtatcttagcagaaacagacggaagttgaaggctcacgtagctcttcgattacattttttgtgcagtgcagtcactcgtctggtagacgtacacgtacacgtacccacgtgcaggagttgctgtagtacaagctagaccctggctacggggagggtgttctccgttattcggctgcaggttcggatagactactgtaacaccaacatgggacgattttcatggtattttggtggctcaaaccgatgaacctaccgcgatcctggtgccaccagcaggttggccatttgcgtagaacggctgccagaagcggagtcagcacaattgacgaccagctgggaatgccgaaaccttggtctccacaaacagcgaaaacgtttgctcccagaccttgatgggggtttgcgtcatgatttgggccggtcactggtacatgtattatagtcagagtttgaagcttattgtacccgtacagcgctgagcagcagcaactggccatctccagtttggtgtgcttgctacggcgagcttctactcgttgactcaatagtctatgatttcgtatgcctagccaacacgctgcttggtattattttagaccagagtgtacagtagtgtagatgcacaatggtcaagcttgacaggagcggtgtcgcacattgtgactcatagtgcgttggtaaactcatttcgcgaaagtgcacagtccgtcggctgtgaccgcgagggccagatgcgacgttagcaaccaattcgcgaaccaacaagctgtacagacttcttggtgatgctgcaaaagaatactggctgccgagaaacctcggctcttgtattggtgctctcaacgtcgctacatgtacgatcatataaaaatctggcggtaccagtggtgccagtggtgccaagcaggttagcatcaaatatgtatcagacagagtgcacgatgccacgaacaactgcaatgcgaccacagcaacacagtggctgctgcgtcatcagagtacagtactgggcattgggccattccatactgctgttcgtgttcacatgaaactgttatatgtcgttgacgcatccgtcgccaccaccacctcattgtggcgtaacattcacgcggtgcagcgtcataaagtcagggatctcggcgtacatactctgccaaggtaatacctatctggtagaagtactacgaaatgcttcgagctacatgtagatttttggtgtcgtatctgatatgaaattgcgtgatcaataaaaagtgatcttgttaatagggtgctgtacgcaacctcagttcgatcttgtatcgaatgccatacgtccgttagagcggcctgtacaataggtgctgcagttccactcattcaaagttctcgtaattccccggtacaccaccaagtgcagcggttgatgttttagttttagggaccactacatcgcaaattgcttcaggtattctgccggctgtgacggtggagcccagccgaaacccaagagacacttaaagcctgttcgctacgtagctggagatggagacgaaaaccaaaagtgtgaccggattggtcaaaagtaggtacaactagagatggcactgtgaattcgtctccagctctttgaggtggagaggggcggatctacctagagatttacagggccaggcacaacatgggagacgaagatgcaattgtcctcgctgcgtgctccgccgtggcacaggctgtggctttgtatgcagacagttgcgaaccaggacctcctgctggcaagaagaaccgttttatcgtcaccactctgcgcttcgagtcgatgcttcaatcatcagcctattcaagctggttcgagaccaatctgcgctgtacgagatccaccttcttccgtatagctagctttctacaagagcatggggtcgcttttgcacaagctaaggtcaagaagcattcctacgaaaagaaggtggcagcggcgctgtatttcctgggctcagcgggtggatatcgcgaggtgggagctgcaatgggcatggctagaagctacgtcatggagatcactatggaggtagacgttagaagctcctttcagacgagacttgcctcggccctgtgctgcttgcggtgcggccgaggcttgcagacgctcgagcatgcgagatggagcgggagtaggctctggcgtagcagacatcgccactgatacttgagctagcggaacaaatgtggacgcagtctcggcgccttctagcagcagaccttcatcaccggcagatggtgtcagcgagacgaggggctcggacgctggcgtttcgtcatgacgtgcggggggcgcaggaaccgaagagccttgagcagcggcatgtgccgcacgcgtggccgcactggtgaggcgagtcggcattttctcaagtggggaggagagccatcccatatctgtcctgtgattggcttaaaatttgtctggagatggatacatagcgaacgagctgtaggtggagatcaagcaccatctccatctctagtacaacgccaacaggctcttacgacaattcgatatgcgctccgatctttgaagttggcgacatagaccgattggtagtttgtcgacgttagttttactgcattgcatgtactgtaacgaatccttgcagcaaattcacgcccataccatcgacaattaattaggcgccaatcgggttgcttgtattcgtattgtaagaccgttgctggccttaccgtcttgctggtctccttatcatattacagtatggcggcgccatgcacacagggcgccacgctccactttgtttgtcataaatcgtgatccagatgctggtgaggaacgagcacggcatggtacagcgccaggctggacgcttgacggcccaacagaagctcgtccagatggagttgatgcacttcccgcttggcacaagttcaccagcgtggggctccggatgagcccttcgttgtgctgttcgaacgagacggaggaactgattgacttccgacgacctcattttccaattggccttctccagccacaacctcatcggctcaagtaagaccagaaaaacacaagtccatcatgcgtctgtatcacgctctgctcgtcaccgccgccgccgttctggccagcaacgtctccgccggccgcgccgactgcgacatggtgccggaggtccctgccggctcgtacggcacgtccagcggctcggcgccggtgagccaggactcgacggccaactcggacgttggtgccagccaggccagccacggctccgctccggctgacacccccgtgcagcagtactcgacggccaactcgaacagccagggctctgctccttcggacgagacccctgtgcagcaggactcgacggccaactcggacgttggtgccagccaggccagccacggctccgctccggctgacacccccgtgcagcagtactcgacggccaactcgaacagccagggctctgctccttcggacgagacccctgtgcagcaggactcgacggccaactcggacgttggctctagccaggctaaccagggctctgctccttcggatgagaccccggtgcagcagtactcgacggccaactcgaacagccagggctctgctccgtcggacgagacccccgtgcagcaggactcgacggccaactcggacgttggtgccagccaggccagccacggctccgctccggctgacacccccgtgcagcagtactcgacggccaactcgaacagccagggctctgctccttcggacgagacccctgtgcagcaggactcgaacgttgcctctggctcgggcgctccttccggcgacgacgacaccaagcaggacgttgttgtccctggcacgccctcgggctcgggctctgagggtgccacccctgcccccaccaccggcctggacgtcggtgccagccaggagacgacctcttcggactcgggtgttccccccactaagcagggtgtggaattcgtcacccccgcccccaccaccccgtcgaccgaggatgcctcgcagaagaccgacgtcgccggtgaatctgacgttgccggtgaggctgaccaggtgacggacgcgcccaccaccacgcaggcccccacggtcgcctcgagctcgagctctggcctgacccccactgctgccggcaactccacgaccgctgcccctaccactcctctgaaggacaactcgaagctgtgcgcgaagcctcgcgtggtcgtcacggaggttgatgtcggcgccaccgtcgagaacaacgaggaggaggccgccctcaaggtcatcgccatcgctgctctgccctcgggcggatctcgcattgccttccagagcggcgacaacgtcatcgtccgtgagctggacgccagcgacaagctgaccagcacccccgccgtcaaggtgccgatgaacgacttcgccgacatctacgccgaccagaacggcttcgtgatcctcggaacgagagacgctgagggcggcggcaccctcaactgcggtaacccgagcaacctgtgcggcggtggcccgaaccccgcttcgccgtgctacgacatgtacatggctcgctacgagggcgccagcgagaagtgggccaccaagctcacgtcgtccagcgcctcgctgcctccttactcgtcgtcggccagcggcccggacgtgtacatgatctggtggtacgctcaccacggccgcatcgcgtacgacggcaccaactgggccgcgtacttcggcgctgccatctcgacgtcggagggcggctgcatcaacatccaccagggtgaccgcatgaaggtggtgagcccctcgggctccatcacggacagcaaggactcgttcgactggggctgctcgcactcgggctacgagcgcatcacgtacgacgagcgctccaagagcttcgcgtcgatctgtaagacggacagcaacaaccgcctcatgccgcccaacaactgggacgcgaccatctaccccgtggacctcgctgcctccaacctcggcgacatcgtgccggactcggtcgcctcgagcaacaagtactggtcggcggtgagcaacggcgacggcgacaacgccaaggtgcacctgatccactacgacctgaagtcgaaggccagcgaggacattgtcctgggcggcaccgacgccaacgagcgcgctcctcacctcgcccccattggcaaggacggcatgctcgctatgtgggagggcagctcggctggcggtgacctccgggagggcggtgaccgcacgatctacgcgcaggtgcttgaccgtgctacgggcaagaccatcagcgagaagatcacggtggacaagtccgttgtgggcaaccgctaccaggctctcaagagctacccggacggcagcgtggcgtacctgtcgaagggcaagaccgacacgtcggtgcaggtcgtgcgcttctacggctgctaagcggccgttgatgaaaacggatagaagtgtctatgcgtagtagttgtttcaatctgcgagggtagtttagatgagctaaccttgaacatgaatgtgtaaatcgattcctttcgttggattttattagtgagttgacatgaagcggatggtcggcgttcaattaagcctctgttatcacaacttttgagaccacgggatacctcgcgcttcattggagcatttcagccgccatattcagcgaagcggatacgcctatcgcctcgagactcgccgtgacctggaccagcttcggctgcttgcacaagagaaacctaaatggaaagccctcgagagggcaatcgtcgccgcactgccggcgaagaaggacccgacgtatgcggacaccaccttatgccgtcgactagcaaagctgagcctagcgacagcatagtgtggtaacgcgaaaacgtaatacgttacattattcagcgaaggcgtctgaactggccgcggttgggaagggaacaaggaggggtttcgttgaatgggatactttggcgctattcaaggcttgaatttcatgcaacaccaagaatcaagcaccaggagcaaccgtgtattgagcgattaaggctctccacggaaagcgtcacgaaatcctgccacactccacacatacttgcttaagtacacttaatgtagatttatactgggataggaagcaacgttagtgctgctatcgcagaccaaacaggattatatccgtggttcgtcaagtcaaaaggtgacccctcttgacacctaactggtacattgtcctgaaaccggtgtgaccccggtgctgcactgggccctccaaaaggtttatatgcgtgggcaagctgaactggtagaaaacccattacaccggtacgaccgcggtgccgcactgggccctccaaaaggtttatatgcgtgggcagattgaaccggtatgagtcagtaacatgtatcgaatagtaggagtgaagtaaagtgattccttcgctttcgtaagtagcatataggggttcctgcgaagtcgtcggcgtggacagctgacattttgcaggaaatgtttgtttcctcacgagatttgactggctttcattatgcgaatgttgccatacagttcttctgagcaaacgtaagcgggagccgccgacgcttacatcaagtccttcattggctaacatttgacagcaacacacaaagaacatcgacccagcggcaacatgagtgatggaggctcgcaacgcgcttctgctccagcgcggagtaccagtcatgctgacgtcgaggcgatacgcgatgcatgcgtcaccaagcaaacaagaggaaagtacaagagcagcctcaacgggatttaaaagtggatcaggagctagcacgctaaggaggatgagaatatcgccaggtttttcgacgctgatgatgacattaatctaagtgagtttacaccgagtgtttttgagcgttttctggtgttcaagagtgcttctgtgaagacggctacgctgagcgggtaccgaagtgctatcaaggatctttatcgcgtgaagcgcgtggcgctgcctcctgagtaccgtgatgatatgaagcaactgttctccggtatgaagcggatggaggctgatcaagaccagactagcaccccaaaaaatacaccaggaaagcagccactcacgtactccctttataaggagttgtgcaattcgactctcgtggcgggtgatggcgggttttcgcatctttttttgacttcgcagtggaatttgatgtgtcgctcaatgtcggtccagactctccaatgtcagcatctcgtggcgaaagacgatagcgttggagtaatatttgtgaagacgaagactaaccaggagggttcagggtcccgtgatccacgccacctgtacgcgaacccgctgagcccatcaacgtgctgggtgactgccttggcaatttatcttgcatgccaccctcgattggaaccgggggcactatttccaggctctaaccagaagctacgatttagcaaggtgctggctaaccttttgaagcaaggagacgctggtaaaaatttcggtacgtactcggtgcgcaaaggagtggctacattcgcttgtggaggaagtacaggtggtccctcgatcgtgagtgtgtgtcttcgctgcggatggagcctcggtggagttcaagatcgctatttccgttatgaagccgcaggagatcaattcctggggcgagtagtggcaggacttcccgtaaatgactctaagttcgctactttaccgccctattttcagaatggctccgataaaaatgtgaaatcgtgcgtggagattatgtttccggttctctctcgcgaagccaatatggcaggaattttgcggttgtgcctagcatcactcgtgcatcacgcggaatatttgctgcagcttttaccggccacccatgcattactttcgacacatttgtttacaagccccactgtccttaggacgcttgaaggccaattagttgctggagagtctctctggatgcgaccaacggggataccgccttatattgagctatacaagaagcttgaccagcagcaaaggtcaattgatgagctgcctggcaaactggagcagagaatggagcatgtacttgagaaaagggtgtggcagcgggcaatattacgagagagttattgcgtgaggaaattcgatcgttgttagacgaagttgggcttcaccaacgtccgtcgatcaacgccgtagtgccagcgccagttccagtgcaccagtatcatgtctggggcgggaaatttcatgtgctacctagagaatttagttttccgagtatcgatccccttggggcatggatgctatggtggttcggaaatccaaagctcaactaccccccgtacaaaggaataccatcggacgacctggatacatcgcagaaaaaagcgacgctgtcagaatggtcaattatgatgcggcacattatgaatgggattgaggccaagctggacgcacctatgcccgaaatccgtgacaagaaacacgctattgagctttacaacattggatacggtacactgcggttaaaaccaagcaaacgtaagcgaagtgctgaacagcttaagcttacaactgttttgagactcatccgacaagccgatcaggagcgaaacgaagaagacactcagccgcccaagcgtcagagacacacaagccagtccggttgtccgagattggcaagcaggtagtagctatattcaaacagtacacatttacattcgtgttagtgcagtcgagctgatcccagtagtgcgacggagtgtaaagctagcaaaccttgctggcgtagagggtatcctaaagccgaagttgttagcgtaagttttatagccatttagcaacaacaaacacaaatctggtagctcgtgaagtcgccgcctagaactcggctgtcgactgttgcagtcaccgcttagtcgatgttgcctgccgacctcgatacgactgcacgtgacctctgtacctatgtatggcacttcaataaactgcttggtcgccgtagtctccttcaacagcatcaatattaatctggttagctcatgtaggctacgatacaacatcagtataataaactgcatgcaacgcagtatacaggacaacatgatatacaacataccattgttcggagcacgccataccgcatcaactcctgtcgtcgtcttcgccgcttacatcaacgcggaaagatgtcggaagccttgagcgccggaatcctgagtgggcctctcccccaggccttcgaacgccaggtacgaatgcagcgtgttgagcagtgcgaccgagcccaacagcttgactgagtacgacagcttgtacagctgcagcagcagacgcttgcctgtaagcagcaaaaacaactggaccaagattaatccaaagtcttgtcaccaagcatgaatctcgcagacatctctgaccaatgaccacacttaccaagcgctagagaagcaccacacgcaggggagtgctatcatgaagaacaacacgtaccaaataaaacaggttagcaataaggtatagcattcgtttgctacgagcgtaccgttagcgccgtactcgagcgccgatgtctcgcacgatcatccgtgatttctgtttattattctgctgacttgagccctggccgtgcaaattctcgaatgaggcggattttgcaaaagcggcaaatggaagtcgctgtgagccacccagtccgacaccttgcagattttgttcaaatcatacagtgggcccgcgcccgtcccaaacattatattcctaattttgacaaactctggtctctgacatctggaaaaataaaaaggcgcgaacagaaactaaacgtaattttatcttgacgtttttatattggtgtgttgggagaaaggacagtcatacaaatttcaagtcaaaattggcttaaactgcatatatgcagtttaagccttcaaatctaagctgcattatgcagcatccggtttggaggggttaagcctgcagtttgtatgaaccgagctcctaaagttcaggcaggctgaacggcacatcggctctgcctgaagccacccgattattaatacgtggttatactggttatacgtggttgtactgtaccgtggttttgccacactgcacgagttcatcgcactcagttcattgctcagtcacctagatacccgttaagtattcaacaggggacaattcctacagtaccaacgccagcagtactctattcaaagctcatcgacaagggcctgcaggtaatcctctccgtaatgatagcatcggaagacaactaataatcactgctgaacatgcgtctttctcgatagtcttcatagttaacgacctctcgtgcagtaataaagtccaatctcgtatcaccatccggaggatactttaattaataaaaagtattgtgaaaaccgcttcttttgcctattttggtcgtaaatcgatcgattagcaccgtgattgagctcgatcgatttgtaaatcgatcgcgcccctgcgatgcatacgtgagtatggagaccaagtcgatatagccgcgtttcgagcagaatgcccaccttttactgggcaatcgcgcagccaagcgatgcgtatggatcacgatcgatttcgaacccgatttatactctgattaattagataattgagatctaataaggggtttctacagatgggcgttttagccggttctcacaataaaccgtcggtcatcggggtagtctctactgtattctgtatcattgtactgtagtgctaaccagagggtacccctaccgaggattgctgacatttttacccaaacagaaaacatagtcattttccacacagccacacatgcacacacacaaatattcgtctctcatcttaacagccgaagaagcgcacgacctgcaccgacgtgtcggtcgtacccttcgacaagtacgcaacgctgccgtccgggaagcttttcagagcctggtaccggttacccaccaccgacttgtccaccgtcaccttgctgctgattgccttgcccgacgacgcatccagcacttgggcgtagatggtgcggtcgccgccttctgcaagatcaccgcccgaggagctgccttcccacatggccagcaacccgccgtcaccgatctcagcgaggtgaggggcacgctcgttggcatccgtccctccaagcgtgatgtcgtcgtcggccgcagcgtcgatagcgaagtggatgaggtgcaccttggcgttgtcaccttctccgttgctgacggtggcccagtacttcttgcttgaagactcgctgtccgggacgatatctcctaggttggctgcagcgaggtctactgggtagatggtcgtgctccagtcgttcggcggcatgatgcggttgttgctgtccgtcttgcagattgacgcgtaccccttcttacggctatcgtacgtgatacgctcgtagcccgagtgcgaacagccccagtcgaaggaatcagcttgcgtcacaatcttaccggacggatccacaactttcatgcgatcaccctggtggatgttgatacagccaccttcggaggtggagatggcgcagccaaagtatgcagcccagttcgtgccgtccgaggcgatacgaccgtggtgcgcgtaccaccagatcatgtacacgtccggaccgctggcagatgacgagtacggtgggagcgacttgctggaggacgtgagcttggtagcccaagtttccttcgaaccgtcatagcgaacgagatacatgtcgtagcagggtacggctgggttgggggcactaccacacaagttgctcgggctaccgcagttcaaagtgccaccgccttcggcgtctctcgttcccagcagcacgaaaccttccttgtcagcgtaaatgtcagcgaagtcgtggagcggcactttcacagcagcagaactgctcaccagcttgtcattctcgtccagctcgcggacaaccacatcgtcgccgctgtggaaggcgatccgggatccacccgaggggagggcagaaatggctacgaccttcaagtttacttcgtcttcgttcgcgtccaccgtgacaccgagatccacttccgtgatacgcacgcgcggctccgcgcagagcttcgagttgtccgaggatgtcgtgctgctgctcgagttcgtagcaaccgatggcgtagcagccgcagacgccgaggactccgtctcagtctcagacgaagactcttctgtggagtcggtcgtgggagcatccgtggttggcttggagactggagcatcggttgccgtctgagatcccgggcctgcagcgctggcctcgttgccttcttcatcggaggaactggtgggggtgtcgaaggagaacgacgagcccgtggaggtgacgggggcatccgcgacggtcgaagttgacggtcggtatcggcaggtggcagcggaagcagcatcgttgtggctgctggctagaagagcagccgcagttgcaattagaagatggtacaaacgcattgcggggagatcgcaaaagggggaatgaggacgcctttgtgctgttcgagcgagtcggtggaggtgacagtgcctaaccggtcagttgtagtctacaacatctacaacttgtagatgttcggacagcaatgcccgaccgactcgagggaagtgaacctggtcgtgtttctcagtctaatgtagcgcagcggggcctttaccctgcgtagagagcgaggaggcgagcaatgatgaagtagcaatatatcagcggactagcttttaccggtcacctgacaggcaaattcatgcagctcgcgcccagatcagattttcaggtaagtgcatcacttcaaagcacccattggaaaagtacgatttgggctttttgatcttttcgatccctcaagctgttttaatcaagtttgaaaaaacctctctaaaacgatggtcgtcgtcgaaggtaactgctcacggtactcgcgtaactgctcacggtactgcgcggctggaacggcgtttgcgcgcggggtggtgggcgagttgggcgagttgagcagccagcaaaaggagaagtgagagcatgagagagcatggagctcgatgagagcgcacgctcaccactcactctccttctcctgtgttccgcggatctactcacttcacccagtcacttcacccagtcactcagtcacttcacccattcacccattgcaccttgggttgaatgagagactgggtgactgggtggtgaaaagatgggtgaaaaaggagtaccgtaatcatgtcaaacacatcttagtgctcgttccgtgcgtaagtgcgcatgcgtcagctagccaatcgtagcgtttcccgatcgcgccgttccaaaccgacaagtgccgttccggtgaacccatgtccgtgatacaaacgtcaagtcaaccgtaccaagagtcgaccagcgcgaaatcgggttcgagagcgcgatcgaccaatgggcgcgcgccttcactgaaccagccaaccagtctacccatgaacgacgccagaccccccccccgccccgtctgctcctgctgctgctgctgctgcgccgattgcgcgggacccacggcttccggaggcacaactcgaggccttcttcatggccgtgctcgagttgccgctggtcatgcagaacctgctgttcgcgatcccccgcaacgctcgccgcctgctcggcacggtgatctgggtgagcctcagtgtgatcacccagatcttccggacctctttccggcgccatgtggctgggattaaccaaggcactgtcctccaactcttcaacctggcctacttggatttctcggtccgtcctctaagactgggaacccacagtgacttcagctcgcggatgaccgcgtatgtgcaatgggcgcaactcacggacgatcagctggccattgcactggagcgagcgcgcgtgcgccgcaaccgagacgataatctccccgatgaccccctgcatttctcgactgatccagactggaacccgacggcacacgggatagtacgctgttttcatggggactgtggctcaggttgatgtatacaaatgtatacctgtatccgtacgatgacactatgtatgtgttttgtattttgtataggctgatgtcctgcacctcctgatgcctgtcaccttcaacggactcgagaactgcctagtgatcaagtacggcagggccgggggcgctgacggattccatgggagactccgcgcccaccgactcggtggcaccgaggtaccgggccggacggctatggctggtaccttccccgggatcagatcgtgccgctgttcatggcatggctgcctgacgacgacaaaatattaaaaaacaccacagatccgtgaattccaccacgatggtgaaaatatacatccaaaatgaaggcggtagtgagcggttgcgaggagcgtagccgtagcaaacccgcgcggggtgcccgcgaagcagggccgcgcggtatttgcgtaggcgggcccagcgacgagcattccaacgaacggacctgttgccgcacactcggagttagtttttctaatgcgggggtctgggggtgcaacccccagtatgcttttattagaggcccttgtgcgattcacagctttgtgtgtttttaatgtgctgtccctgacgacggattgctccacgttccggagcgctttgttcgcaacgaggcgaaccgtcgacactggcaccatcgctggctcgacagcgaaggccgccaacgtgaagaactgcttgtaatccctcctgaccaactgcccgaggtggagcgcatgttcagggctttaatgctcgtcttcccggcgtaaatgaagccagaagccagaagccagtgcgtaatatatagtttacataggcaaaggcaatgaatatataacaaccaaagcgcccagatcagccgcgggcgtgggcgacacccggatcaagctcttcaaagtgttggctagcctctccgaagctaggtggcagtgcgtttgctcacgtgccatgacacacccggttgttggatcgacgttccgttccccgacgagctccacttgtgcttcgtggaaagcaatcctctctcaatggccggtctactgttgagtcagcggcagcactcggcatccgctgtcgtatccttcgaggcgggcacccggtgcatgtgtgtagctagctcccgcaaaaccgtaggtcaactccgagcaggcaggtcaaacctcgccggccagctggtgttgccgtcaacatacagcgaagcgctgcaatgcagacagctcttccgtcttgtcaagtggcttccgccaccatcctggtgcggacgacggacggtgcccacggcattcgcttcgtacatgtagtcgatgaaggatctcgaatttgagcaagttagcgccccgttattctgcagtacagcttgtggatacggcagctgtccaggccgatcgcagctggtgatcgcgcacgctgcgagccacaaacagcgtgagcgtgacgtccccgtttgttgaacattgcgcgctgccatcgttgaatcgagctggtcgccgccgcctttggcgcgctgatcctcgccctggtcgccctgacttgccgccgttggcgcaacatcctcgtgtcgccccgaatcgatgctgccgccgtcgaatgggcatgaacgaagcgctgaatggatgccggcagggtctactttgtgctggtagacgaatgaacgacttctgcgatcgatgctcttccccagcttactccttcttgctgctcgacccggcaccgcgttaaggcgatgatcgtctcggagcagagtgcgcgcagatgctgactcagaagcccggagctgatgacctctagtggtgcaagtcccaaccagggcaagcactttatgaagattgatccgttatgaaggcctcgccaaaggtacgccaccacagctgtgactcatgggggctccgcgcgcgacttcttcacctccaggaagaggaggcacacgagctactgtgctgagcccgtggcttgacgtgaggccttcgtcgacttccagcatctccattctgcaattggccttccagcgctacagttcatccaccagctcaaagcaagatcatgcgtctctactccgtcctgttggcgactgcggtcgctctagttgcgaccaccagcgtcgccgctgagaagtgcaccctcaagaccacggctcccgtcgcgaccactgccgccacttccgtggtgagctccactacgtcgtcctacatcgacgatgccagcgccgaggccgcctttgacactgatgcctccaatgctgcctcggcggtcgatgccagtcaggccacaacttcggacgagggttcctctgctgccgcctcagccgtcgatgccagtcaagccacgacctcggacgaggatgacgaggactccactcaatcgagcgttgccgcgtcggctgccactgcgacctcgactgcgggtgaggctgactctactgtcgacgcgacggaggtaccgacgaccactacaactgccgcctccactgctagctcagcaacttccactgctaccagcaccacgtcgactgcttcggcatcttcgagctccggcttctgcagcacgccccgcgtacgtatcacggaggtggatgtgggtgagaccgtggagaacaacgaagatgaagctggtctcaccgtcgtcgccatcgcatcgctgccctctggcggctcgcgcatcgccttccagagcggcgacaacgttatcgtccgtgaacttgactcgaacgacgccttggtgaacagcaccgctgcagtcaaagtgcctctggtcgacttcgcggacctccacgctgacgatgacgggttcgtcttgctcggcacgagagatgccgagggtggaggcaccctgaactgcggtagcccgagcaacttgtgtggcactgcccccgatccagccgtgccctgctacgcgtgtgctacgacggatcaacggagacgtgggccacgaagctcacgtcgtcgagctcctcgctgccgccctactccacgtctgccactggagaggaagtgtacatgatctggtggtacgcccaccacggccgtctggcgtacgacgggtcgaactgggccgcatacttcggctgtgcgctgtccgtctcggaggacagctgcatcaacatccaccaaggtgaccgcatgaaggtagtggattctaccggcgccgtcacctcggacaccgactcgttcgactggggctgctcgcactctggctacgagcgtattacctacgacaaccgcacggacggctacgctacgatctgcaagacggacagcaacaaccgcatcatgcctccgaacaactgggacgtgactatctacccggtgctgccaatctgggcgatatcgtcccggacagcgactcctccagcaaaaagtactgggccaccgtcagcaacagcacgtccgacagtgacgaggacaacgcccgcgtgcacctcatccacttctctatggacgccgaggcttctgaggacatcattcttggaggaactgacgccaacgagcgcgcgccccaccttgctgctattggtgacggcggtcttctcgctatgtgggaaggaagctccacgagcggagaccttgagtacgaatcgagtggccgcacgatttacgctcaagtgcgggacgcgtcctcgggcgcggccatcagcgagaaggtgacggtcgacagctctgtgattggcaaccgctaccaagcgttgaagagctacccggacggcagcgtggcgtatctctccatgggcacgacgagcacgtcggtgcaggttgtgcatttcttcggatgctaagagctggaactgaaggcaggagtggtgtagtgtatagatgtatggttgcgtctgcaagcgctcggctatcaacgcctacagaaaattgcgtagtacatgtacagctgacgatgccaatgtgaacattttgccaaaacagcagtgatcaatccgaagttctggggtaggttgccgctggcaacttaaatgagactagggctccgcgaaggctgggataggaggtttttggtataatcgctttctattattatgagtttgttttacgaaccacgggcatctccttcgcagccgcagcgtctgcccggtaattcacctcaaaactgtagatagtgcttatacacagtgataaaacgaatcttgctcgagatctgtttgtagcttgtagaaaatgaaaatgtttacctttgtatgcttctgcagcagttcgtccgcttcaatcattcaattgacttgcgaaaacgtaagatgcattctgcgacggtatcaaggcacaatttgattggctatcagcccgaaaacgagccggcctgagtgaaggcgacgactcgaatgaggtagtagcgaaaagaacgagccgagacgaattccggccaagccggagatgccgctttggtgttcattgtatgaccgatgggcaaacgagccgaaacctggcatggctggcgctgctaatgataagggcgagaggttgtaacgtgaacgtttgcaaactaatatacgcgatttggataaatgcaattgcaatcgatgcggttcccagtatagcgaggcttcgattacccacacacatagttgtagatgcaactttgcctttgtatactccaattagcgaaacgccttgtaatcgctgctttcctgttgactggattggcaaagacatggctttggattcaactgtagaacttcttgcacccatggagaaatcatgtggtaaactacatccacctcatgcatgaatgcaggtgtagcgctttagtgtgtgttgttagttgggaagggtccaggcaacgaactacttcggtgttgaagtcagtgaaatttgacttagtgatcaaacgtggtaatcctcgtggctttgttgcttcaactacagaatgccatgcttctgtctgcaacgacacatcctaacttgcgtcttaggtattgtcttatgtacacaacggttggatatttttctggatgtctatttcatttgatgtttgtatagtgcatagaatgcctccggacgtgccacaagcttacagaacacccagaggtgacacacctactttgtatataagtttttgtatggaaagtttcaaattccgattttttgaaaatcgggactcgctaggccctagtttctgttcggcgggcaccctgtcactatccgtggtaagtagcattattcagcatgggtatgcccaaccatcccacgagctgagcggaagcactgctcgcgggaacgagcacgagtagctaaaacctcatgagcgcgctcgctgatctgtagctgctcacatgaaatcgatttaaaggggggagcgcgaatcaaagctcctcacactaattggataataataaatttactttaaaaaattgtgcctaacttgcactcagagcagttgttcatgctgatgggggtatcatcggcttctgtggttactgtagctgacggccaaacccgtatcagtattatggggcacctctgttgagtgtgatgctgccacaaagctgagccattttagcctatcagttcactcctcaaacgagctgctcgttggggtcgtacttatccgagggagcagcagaacccagctcgtgatttgaagtgagcgggctgcatttcgtgggatgcttgggtatgccacactggagccaatatgcaggatatattcagtattagcacggctttgttggcccccatcgtgaatcttatcttcccttaccatttttgtatacaaagatcaagtctaatttcgctgcatatgcagtttacatgttcttttcggctcccggtctggaggggttaaaggacgggcatcaacagcaggggcagcgactaacaatccggctggcgttgcttctgttaatctcgtgatctgttggctacagagcagcagcaaagcttccctggcagcaacaagactactattaagtgaactcctcataaaaatcattttgacaacacctcttcgaaagcaagccgaatggagaatcgagctgatcagactcgacgtcaccttcaaattaaaaagtagcgattcgcccctacaagttcatcaaattttgaaacggaacgtgttgtggattgacaaatcaatcctgggcaccatcataaacattttccacgcaaacggctctctcccctaatctcgcagcgtagccactcctcgtcgcagcttcattcggcaatcgtctcccaagaccagaagcgcacgactcggaggctgaagcagagtgctgctctgccaatcactcactcgccccatgcgtctccagtatgccgtagtcgtggctgctgctgctctggccgcgagctccgaaggacttcaggtcctccccaattcggccaagtccacgtcgctgcgagcaagcgctgaagctcggtacccgcctttcgtcgagggcaagggagaccgcttcttggttagcgaaggcaatcaggaatggtcgactcagacccagaagggctacgagttctcgccgctgcaggagcaggacgacgtgctgcagcagaacgacgatgagtacgaagacgacagcgactcgagctcacagagcgagagcggcttcgatgacgaggccaggctcttcgggaggaagaagaagaagaagaaaaagaagaaacacgaagccaccgagacaccaacgcccacaccgacggcgactccagagggaatgaccgcgactcccaccccagcgcctactacggaggagccaagcggctggaggaaattccttgcctggtacaggcgacaaaccgctgattaaacaaggaggaagcttggtaggctgggatacccagagcgcatttctaaagcgcagttgtcagcttctgtaatccactagcttacttcagtgaaaaatttccgtgcggacgtgtgtgttcccacgagaacagggcctaggggacgcgcaagaagaagaagaagaagacgaagaatgaaaataagaaacaggaaccaatctagatttttataagacgagggatatagcgaacgtcaagttcacaaaactagagtacgggagttggttagcgttattctctcgtgatgatgccgctgtacaatgtagcagcatcaccaaaccttttagcgaggggaccacagagaatttgatatacttccagcattcattgggaacaatgaagtactcagtagagtgccatgaaaagtaatatggttgcaccgggtaaatttacaaaataaattaaaaatagaatgaaatcgatcgtcaaaatacggattcaatcggcatattcgagcaagaaagataggttgagtaaataacaaacaattccgcaacgcattaaaaaatgtgtaagatcccctaccgcataatgctgatggaatcagatcgaatttactccaggacaagcggcagtatgaactggtttctatttttttttcaactcgacttggacgactctgggtttgttcaggatctcaggtactgtagacgtcgagtcgtcgtagttatcgttttacgaacttgaaaaaatgggcggaacaagttgttcaccaaccaagagagcgggctacccgaaaaggttatcccgaatcccccactacgagtggtgtacaaagtgaccccactactgcgacgcctacgccgttcctcatcgcttgactccgacgcttccaactcagtgaattcgtaggtagcgtgcgccgaagctgtttcaacgacttgtagttgttgagtgttaccgtacacgccagcgaccgagtccgaaccgctgccattgatctcttctatcgtcaccttcaagtggccagtacgattgccgtgcttgtaaggcaacagttgaacgacttggcccggaatgggagtgacagtagccgccttcttgtccaccttgtccccagaatctcctgcaataacgaagctaccgatgcaaaaaaagcaaggtgaccacggtcacaagtcttaacggtacacttccatcgctggtgcgcgcagagcgttgaagcagttggccccaaggagttgatttaggaatgagctcacctgaggcgctttttggagtgtacaagtgtgagggaagatggacaagaggatcgggtggcaaaggcagattctatcctatgatgacttgattcattattagcaattcgttggaggaacatgcctcaggttgacaaaccgctcttgtataaaaactattggtctggctgacgcctcatgattgacaaagggagaatatctcaggctggtaaagcttgctttcgctcattggcccgaatcttgccgacgaggttgtgggaagattgatgactgtaacaacgtggcacctccaccaactcgatcgcactaactcttgtcgcctcaccgattaaagggttaaccctttgaaaattggagttttacggccccttcactctctgtcgcacatctcttcaactctgaatacagtcaaaatgtagaactcacgaacgaggtacacgtacgccgtttttatcttaaaaaagcgaataactcaagggatactggacactcactaacagttagttgaaaactacacatgttagctacactgtatagtggaggaaatgggtacatgaggagattacttagtaatctgtacgaaagcgtatttactagctggtctgggtgtctatattgcaccgcggactttgacataggtaggaggcacctaagtcgtcttcactcttaaaatcggtcatcatctgtgctgataagtggtgtgccgagctccacccagcaaatgtttccctatgttagcagattcttcaaagtattatagattggatggtaaattcttagttttgagggtgcatttgtgttcagtttgatacatcgcccttctcggctgccttcggtgcaaacatatactcttctccatactttgctctaacgctactagcatgttagctcaaaatactagacactaactaacagttagctaacatgtatagcaactaacatgtcagcgttagggagtacactatcaagggatgaataatttgtatgagatactgtactagtagtataacttatgtaaaaaaacacagaatctacaacgcggtgactgaggatgacatgcacacttgacagagtcgagactggtaacggcgcaacgtagtgcagctactaaaagctgaaaagcgcaatgctaaccgaaacaaaccatttttggttgagcatacgcttcggacaaggatatgatgctcaaacaaagccaccagcgtatattctccacctatccgaacgacagaaaacgacacgacaccaccactcggatttcgtaaggtaaaactaccaaacaaagtgtagcgaaaaacataaactatcggtatttttacagctcaatttagtgtcagcctgtgccgacgcagtacaaacggaggtgtagatccagcattgttgttggtagagcacaagtcgacctgctggcttgaagaagcacttgaaggccttccgctgcacaacatcgcatgccgatcagactcgaaatggttgaattttgtgttgaaaaacttgaatgctgttgcgtcgttcgtgcatccttgccccggtccttcggtctgtgacggttcgcagggggaatctacggggttgacgaggaacgtgattgccatcttggacacactgtgctttgactccgtccgagaactaggcgcagtcggattgtctggctggaagtgctttgcgtgcagcttgcaataacctcgaatctgcacaaacttcgtgcactctggtacgcaacaacgccggccacctccatgcgaaaggcaaacgccactgtactgcgcgagttttggacaggcatcaacagcacagcgacgcccgcctccatgcgccacacagaatcctcggctctgggctaacttctggcagtccggaccccgacaacgtacgcctcccccgtgcgccttgcatagtcgacgagtctgcacttgcttcttgcacccctccacgctacatcgaggcggggtgcgacggcttcgcgacggtgtcatgccttagtgctgactggcgcactctgtttcgcaccgcagattacagactgagaggcgttcgcgatattcgcacgactccatggattacgaccagaagtgtactattttttatctcgactcactagccacgtgatgctcttgccttcacaatcaattgtgttcgtgaactgtgcaacgcttctgaaccacacattatagaactctgtacattgtacagtgacgcaggcgcgaattgttgaacattcgagcgcacaacgaaggagacggagaaacacttaccgaagtgcaagacttattgaaatgagcctcggtcttctctcctccggctcgcattccatggaatcagaaaaatgtacacaaagtcttttgtgagaaccgatactgtagatacgaaggacaaaaccgtcacgcaagccatcggcacgcaaagcagctggagccacacagctcggtctttatctccagccttgctggccatgacacatcaaaggtttgcgagtcaaaactttcaaaacttacaacttaatgtgctccaccccaatttactcagatctgagtcggttgtagtgtaccacacaccaatttgtaggtatggctacatcgaatatactattaaccctttcgcggtacagtcacacctctataaatgatacccagttcgctcggtctaataccctgtttcagttaaagaattgatcagataaagaaatgactacacttctaatggctacattttcatatgttaggtgcacaagggctttctttacctggtacgcctctagcattttcgtactcttgttttgtttcgtcttcacacaaacagaactcaaccaataacggtaggcgcggtattgtctgttcctactccttcttctcattggtattagcagaatcgcatcccctcaggttgtacgtgagtttcaatacagggaggttataggaatatttgttgtcccgatatcctgccaccatgcctgcagttttatcttttgcttggtatgtactgcatagcccctagttgtctcgacatcataatattttagtttttcgtaatatatatatgtagactgcgctgattgtaaaataatttggctagcttatttatcacaagcttgcagttactgcaaactctttgttccaacttagcatcccaaatacaatttctctcttcgctcgatttcttgtggccgggagtagtggtggcaatggcatacgtgggaggaggcaggcaagtgattgagaaaaatatatgagtttggatctattactacggcgtccatttagagggttgaggcgccaacaatggcgaccatttagagaataaagagtttttgatcagttatagaacacctatagtgaaatccatataatcccgtttgcagtcgaggaatcctaaccagatagggatcacatggtcagttagaggggttcatttagggaggtgtcactgtaaaaggatacagaaagcgccctttagatgatttcccaaaacacggtagagtgtaccccctcttaaagggcgtatcctgtgcccttttgcacaagttcaagctagtaatcaaccttcttttaaaacaaatgataatcggtacgcagagtaatcatcatgtaatcattgtctctacaaattcgaagtcatacgcatacattctatttatcctgcaaatcaccgtagatggcatgtccgatgagacacaccgaaaaggctcccttactttgtaagaggacgcctagagcacccttttagaaggaaatatcaatgagttgtatacagtcacacctctataaatgagacccagtttgctcggtctgagaaattgtttcagttaaagaattgatcagataaagcaatggctacatcctataatggctacattttcatacggtactgatgtttgaggtttacttctctggtccacgatcatatgcgcgaatcactctttctaccacagctgtgccaattctactggtagccaaacaagcaaggtagcaacgaaaagctgagatcgagctcaagcacatgatattttttattagcagcttctgcgaggctttggccgtaatactatcgacagaagcagctcatctggcgatgaaattaggtttttttcgtaaaccataaaccacaatagcgatattagatcgaagaattgtctcagattgtgcttgatgcaagctttcttatgatctccgatttagagccatcagcgttgatttgtgagagctagagcctcgaataaaaacgaggtttttcctgcttgcacggttgagattcgcatccagcaatttgtttttgcccaatcaggacacagttcacatttatgctaagtttaagattgcgttttaagaaaaggttatgcggagagttatctaaaatagcaggttttatttaatttaggttgaagtgcacgcattccagcaaggactgtttcttttgaaatggtcagtgccataggcattgctgttgtcccgtggccaagatgatacttgcgcaccctaggtagagcgtatgcgttcccacctccatcagctataacacattgcagtaccttttgtagtgttgcaaaacacttgtcgattgtagcagctgggatactccgaaacgctttatccacagcgccgactagcgccttcaaattggtcgtcgggtgacggtactgcacgcgtagaatggcgtgaaaaacgcccaagtcaagtacgttcatatcgggcgagcgaggcggctagcacgacatttctatcgtccaaccttcctcgagcccagcctcaagcacttctgcatagtcctcggctacgtgtggtcctgcattgtcttcctggactttgatgcacattttctttcttcctacaaacaaaaaacaggagagttagtcaccagcaaaatagatctcgtagtcatttcaattacctggccaaagacggcgaatcgcaggaaatactttttccttgagcattttaacgtagattgctctcgtcatgttgacgttcttgacttcaacggcccctcttactcggttgttggatttccgcttggcagccacgtactccacaattggccacatgccaattttcccatcaaaataggattttcgcctagcgtcgtaccgaggcctcgccaccgcagcgagaaacataactttacctatgtatcgacgattggggcacgagcggtatagcgctagctcgtctttcgtgatgtaatattttgtggaagccttgtacaaattaaaccacttctcatcaatgtgtacaatatcgtacatgtgatgcattctgaaatctcgccctcctataatacaaattagatacaaaagtttttgtgtaattttccagtattattatcatgatttagagataaagtaaaaacaaattacgaaccagaatggatgctctacgtgagccagggcgaaggctagccgcttgaccttgtgctcttccgtcagggtaggcttcacgcgactcgtaacacggcaaaacacgccggctctcaggtggcgcataagtatagtgcggggtatgccggtagcttctgataggcaacgcagtgtttgccgttcattcatagggacatcctggatgcgcccagccacctcctcggctgagagcttagtctgcccgagggctcgcggcttgcgcggagcgactagcgcggcggggtcggtgcgctggctccagatctcagagaccttccgtctcgagatcttgaacagcttcgccgcagctttgatggcccccctgtgtgctctctcctctctcgacttggtcgcgatgaacagagcgacgcctacgcgaacgctcgcgggcacgtccttggctcctggtgtgcgcattgatcgcgaattggttggcaggaggatttggccattattcggtggtgacggaaattcatattttaagccaataaaaaacgtttgtgtacaatacataaaaccttacgcgcatgttatcgtggaccagagaagtacctggtatggcgaatggtcccgactatacaaaaagcgggacgaactatacagccagtagctccataacatacaaacatagacagatggctctagcgttcaatcacactgaaagaaaaagtggtctacatctctcaatcaatttacggccttctcgcgcgtgcttttctttcttcacaatgataaatctgccgccctcaagaccactgaacaagcattgccgaaaactccggcttcctttgcgtcctcgtgcacatccacgcccaaccgctgaacagccaagcgaccatgctttacactcttcgtggtggtgtccgtggctcgaccgatgcgtgctgcagagggaccgcggcatcatcgcaggggttacggagccatgggtacaagcaaactcctgctgagtggactaaactatgtatgcgtgtgggaaagtcaatgatggtcatcgcacatgcccagaagggtacgatacgagcgaagagccgtaggcctaccaatgtggcggcatcaggcacgggtacggcatcgctggttcgcgctttttctcctgcccctgaccccaagtctgccgccaatacgcccgcgcgtaaccaagagcgtggcgtagtgtttgctattgtggatcgagaagaaacacaattcggaattaagtacctggttaagtggtgtgacgaagctgatgggtttcagtgggatgacacatgggagtatggtgtaggacttcgtgaggacggcttcgatcgtgcgtgcaatgtggtggacaagtggaaagtgtccaaagtgtctacatactaccgatttttcaagctaaatggacattgtcaccacattggagcatcgcccgaaggcttatgtgcattttacgcgctaggtattgcgactgagctggtgagtaacgccggttggcactccatggctcaagctcgtcaatttatgagggaatgggcaggaaggggtaaaacgatttcgaccgagggggtgacgtatggtgaattgcgctgctacgtaaagtttgcgaattcgaggaatctgaggcaagtgagcacgaagcttttggataaaaacgtgttcgggggtgtgaccggccaccaatcgacaagtaaattgtgcgcagttgtgctcgaagaaggtgtctatatctgtgctgcttttagttcactgcgagtgaattattattgctgttgtggatgggaagaaattcatctacgacgacgagatcactggtgttggtatcggacagtgcgatttaagctggatttatggtgggtcgtttgtgcgccgtgtggacatctacgtatgctgatttattgcacgagttctgtcgagtttctcttaaattcttaacgcagtcgttctttttgcttgaacttctttcgggttattggttaacggcgaatctctgatggtgaggaaccgtttttactggacaattcatcagaacggacgaattcaatacactcgtttagtctgcgccacaaatacgatgctggcagatttcttcggtgcttaggaaggcctcagctcttagtattttcgtcctcatgttccatttgctcttcaccgtactgctaccacgccacatttctctctactccggctacacgacacgaggttctggcgcagatgcgtgtgcacaacgctgtgtgggcttttgctgaaagctctggtaacgattgggctcgggattatgcacgtgaacggagaactaagtctgaaccggatcgccagaagaaagacacaaagtggctcgttgggcacggtggcaagcggctccgggatctctggtttgctctccctgttgaccaacggcagttgctgatggagcagacacccgacagttcatttcctgtggacacggatggagtttgcgacgagcgcaaaacccccagagcagtgtcgcctcctattgaaaggccagccaagcctcaatctaccaaggcgaccacccgctcgccgacgttcaagcgcaagggttctgcctccacgtcgaaaaaggcaacgaagtcgcgagctaagaaggtcacaggaagttcgctgactttcaatggcacgaattctgaatccaagtcgaaggcttctagcaagctgcgaggagggaaggctcctatcaagcagcgaggagggaacgtggtgacggacaacagttctacccaccggacgaattcagccagtacgactgtgggcaacggctcagcagcgactggtttgcaaaacaaactcgtcattatgcgatcggctcgggccaactaccatcgtatcgcctctgatgagcacatgatcaagcttcaaacagcgtacgaccatgggaatataggtggtgtcgtcgacgcacttgttcgaagtgtagcgcacgcaattcacttagctcgatcccaggatcgcacctcaaccgtcgaggagacgtatcaagcggtatgcatacgagtttcagatgtgcttcgtccggcgctgaacatgacgcgattcgagcccgagttccaatctgaccccctctcaccggagtttgcagcggctaggctggcgaaggcgctaaaagggtatcggagtggtgtcgtgagtgttcacgacgagttccgagcgcagggggtggtggctgatccggatcgtgccattctgaaagtatcccactcactgttcggcaaagcggatggaattccatctcttcagacgcaaggttttagtgacgcggtgatcttgtttgcaacgatatcatgccgagtaactaaagcggattgaatacatgtatttgctttgcttattcatttagggtttcctcaacaatcagagcggtagatgcaagaggcggtctgcccgttaacccaggcacggcatttccacttgttgatgtagccttggtccgaggtttctggtttttcgatgagctctttttgcttgatcttttcggcaccttgtcgcagctacgcttggtattagcctttccagtcacccgagttaccagtttttcgattttgtttggtgaaaaagtgatgataccatacttttgctgagcagcaaccaggtgtgcacatactagaaacttgccaaagtaccggcatccacaaactttgagtttgagatctactagccacccctctgttggcatttccagttgatgtgcgcgacggagagaccattttgtggtgaggtcatacaggtccttctccttgatacgtagttccttttgttcttcagaatcctcgtttgggttttgtacgagctgatcagtagtatcttccgtgctgggatcctgttcattcgagaccgcctcggaccccccgagagctcacccctccccgatgtcagagtacggaataaagccatggcgctagtggttcgaggcgcgacctctgacacaccatcaacgcttggtgaatccacctcgtcaaacgatgacctaaagtgacattccgcctcatcaccttcgctagcgctggacgtgacatcaacaatttcgagaacccgtatcagatttggctccgacgtgcgctcgaattgtacgcgggaagcttccgccattgtgattgccgcattcactacgtctgtagtcggcttaggtgtgtaattcggcttagcaggttccaaaggggtgatggactcgatgaaatcacaaagtttgagaagaagccgtcgcatgtgatgtcgacgccgctgtaagaaaaactttatggcgccgtttagatcctcacatggattgtgggtggacgcatatccaggggggggggtgatatgcctgccacctccagtaccgacccttgagccattgcgagtcgaaataagtcgcgaattctttcagatgcgtggtcctcttccatttctgcagctcacgatctcggcacagctcaaagtccagcaaaccggtggcatatagtgcatgtcaacgatcgatgacatcaccatcattcttgttttgatcggtagatgctggattcgctttcgcacattgtacaacacatggaagaagcacatgagctttttagcattcgcgaacgccgaaacagactctactgcgatgtatggggcgtcttccgcgtcacccatgactgtgtccacttggagggagaccccacgcacttcacgtataagctccacgaagctgcggaaacactcggtgtattcgtgcgcggttcgccgactgacaacgaagaaggcccccattgataggctctggccttgtccgtaaatccacacgtcaccactgggtaccctatgtcacttaacttgaaagtggcgtctgcgtgaaactggcaattcgacccggaatttgcaaaccgcagacagccatcaatcatcgctaatgatgttatgccaataatgaaatgatcttcatccgacccaacgtatgcatacccttcgctgtctaagctcgcgccaaacaaaaacgccgtgtctgcgtttaggtccgggcggtaacagcgaatgcgaacgagatcttggacagctttgcgagagttcgtcgtcccttgatctctccgaaggcgcttcaacgcgttttgcacctgcttcaggcttggccaaccacgactagtcactgggatctgggattgctttttcaaattgaccagcatgagccgtggtggaataccaatctcatcttgttctgcaagaaattgcttcatcatcgtcgtcacgcgtgcagggtggatggtactacagggaaccacaccacgcatgtgcccatgctcattcacccatatcgtccaggtatcgctagccgtacaggtgaacactttccacacaacagcacaaacccctatgtcgctgcaggtcttgcttgtacacgtaaggcgtctctcagtcattgcatgcatacccccgcatacgctgcatacgtcaaagtcgcgcttaagtgtcaccgccgagcagcacatgtcatcgtctcgataggccttaaagctgtcttcggaggcctggactgaaagccgccgccatggctccattgctgggagtttgctgtttgttcttgtgacttcacttgtgtggggagctacatatagtcgttggtttcaaagggattccccaaaaatacagcacgagtacgtttagatattggcaagatttatttgttcaaccatgccaaagtacaccggtcagcttgtatatcgataccccgctcgtatgttctgtacccaatctacatgatatgtatgacgcagccccatctggtatggaatgcccccaagtctgtatgttttgtcctgaaaatctgtatattttgacaccctcgtcacctggtatccgtctagcattccgtactcatgttttatgtcttcttcgcacacagagaacctataccaataacgataggcgcgtattgtttgttcttgaatttattctcattggtattatcagagtcgccaaatgcgttgtatctaatgcacccccccccctacttgactcgacacataatatgtttttagttatccataaaatatgtatgttagctgatctgagtgcaaaattactctggcaaactaattcatcagtagttgctggcatgcagctgctgcaaaatctttattaacccaaatataattcgctacatttgctggaacgggagtaagggaaccgattgcataatagatgtggccgctttcgctgtctaagccaataccataaacctacggcatgttcgcatcgcccaggatgtgggaggaggcaggcaagcgatggagaacaatatatgagtttgaattggctctatattacggcgtccatttagagagttgaagcgccaacaatgacgaccatttagagaataaagaggtttttgatcgttttggaactgctatagtgaaatccatataaatccgtttgcagacgaggattcctgacccgatagggagcacatggtcagttctaggggttcatttagggaggtgtgactgcactataatttattgaggatactagcgaaagggttaatatttcaatagctatattgtgaaaaccggattagcttgattaggaggggtagaaaatatataaaaaggggtacgctaaattctaaatcgtagcgttggtcgtaaaccgtccacgtgcaaatccctatcaaatgcttatgagagcctagcttcctgtgctattaaatggccgcagaggtgcaatgcatcgtgcagcgggctagagcaagcgtataagcagccactcgtgccaaatttcagccccgtgaatagttcagacgcagacacatattgcatgtacccatcgggtgcttcatgtatacgacagcgtcgagtttgccgtccacgttgacatgggtcaccgttcatataaacgagctaccctcataatgcccagtgtcacatgggcattcgacgtgatttgattataaatcgacggcagtccgcggtatatgaacagggctggggaacgccaagtcggagtagcatcctatttatatataacaaaacaaggtctcagccgcttaataagcacccaaatcgatcgatttgcaaaaaactaggacgtagtgttcggttatcacaataactcgaaatacactataaaaatagcattgtggtgggccttgactaaggccaactgtagggcaacggcgactaccgcgttagcatcggcattatgaatagagcttgtagcaacgcgacatcactctttgctccgctggcaaacatggaatgtgcgttgagacaaatactaaagattcgataagagcgacaggcaagagtctgagcccagcgcacgctaagcagcgtactgaaggttgtggagatcgatgcagaaggaacgagactgcagcttatccggatcgagctgcagaggaatgtttggtattgatatattcctcaaggctctgggtagctacattctacgtgtgtttttttttattattatgatagagcgctcaatactggtgctgcgggtgaagacctggatgcggtgaatactgtagcattggcgtgggaacggagctggccacgacgagcgggagttgacggaaagtcctctgctggtaaagttaccatcaatgggtttgacttcaaacgagattgagcatgccattgaactgttattgtttttattgagtcagtcgagtggttgcaggacggtctgatcgtatgcgcttccttcgcatgacactacctgtcagtctagcataattgagactccaagcgaaaccggacagcgaaggtagaggatggaggctcgtctttacccaaaaacaagttgaaatatagtcgcgctcaagaaaaagtaaatttgcaattgcgcatgggccatgcaagaaatatttaaacgtaaatgtaaactatgacgacgaactgggttcacgacgcagaaaatctggcgatatcttcgacttctcgaacacacgagacgcattctccacgctcccaacgagtccaagtatcggggttagcagatcacagtggctgatgatacttgtcaagcgggtgtgcccgcggtcccactccagatacgttctgccagacatatcaacccgctgaccaacaaatttcctaaccaactgcgattcatgctcgtacaggtgcgggaatacctcatggaccgtgttctcgggaatagtgaagtttgtggtggtggtagctacgagtgcgtcgtcaccgcactcttctaagcgcacaaggcgaagcgcaatgttctcgaaaacggaagacaacctgtgccagtcttgcatcagttcgtccttgccgcacctcactccaaggaccacgtctggagccacatcttggacaaaatgggaagagcgcaaaacagttcagcggcagttcagttcagcctagatcatgttaacacgccttcatatggttataccccatggtcgaccataggttattactatatatatgtatgttacgtttctgcccgtgtaattgcaccggtgcaattatgcagtcacggtgtaattattccatgggtattgtgctatatgcaaataccacaacggacgccttttcatcgtagttgtccgttatgaatctgtccgttatgctctagcgacgagggaacgccattgcagggagccgctctcgccattatcaactttgcaaacaaacggagaagcagctttccaggatggcgggtcgtcgctcgcgtgggttccgcactgcgaggcctcccgctacggcgaagccagcgtctagctcaacccaccttagaagctagcagcggtaggtgcatcgaaaccttcactttgactgtagtttccccctttaacccatgttattcgttgcattgtgtaacagagctaaactccccgccatctccatctccacctgacataacaccagttagttcagccgtgacaccacagacagctccgactacgctcgatgtactagctgcaccatccaagttcagcttggcgtttttgctgaatgatgtcgacacagaatctggtggggaatccagacctctcgcatcgcacagtgatgattccggaggtgacgcgtttagctacgatggcgactacgaattcggctttggtgtcgacgtcattacggaccaaccttttccggacgatggaaatacgacgcacgagctgagggaggtgaatatatgatgctgtcacgcaaccacgccagcgcacgggccaaaccacgaggtgggttggcggatacaagtacgccagggccaataagtacgggataaaaaataacttacaggtgcagtcactatcgcctgccgtgcaagggggcctgtgaattcgttttcaggcttcagggctatgtgaactttgtgccgcacacgtgcggccgttccgcgagtactgacacggctctaacccccaccgtcgagcgagacgtgagcgctgagatgaagagagaagtcgatcgtacggctatatcaacgaccatcagtcgatcggccatttgggatctcgttcgggctcagttctgcggaagtgctgacacaagcgtagccgtcgtcgggttgtcaagagagtacgtcatcccccgagtaaatcgcgtgagagctgaggagtttggaggttccatctacggccagatagaagtcgcaccatggtctcaagttttgaacgaaggcggttggcgaccgacagcaattttccgctcttccactactcttactatgacaagtccagcaagacccgagagcgtatcctgggttggggccacccagtcctgataaacatgtttaagcagaagaagacatcgctctttgtggacggaacgttgcggtgtgttctgcccaaattcaagcagtgcatcgtgttcacgacctacgatcgcccaacaaaaggctattatccatgcgcgttcgtgttggctacttcgaaaaagtacacggtgtacttcaatgctatttggcatgttctagacgcgacggacgatgcgatggactcagaattcgtgtactgcgagttcgaggccggcctaattcgagcggttggtgactttttccccagtgcggccacgatgggttgtctgtttcactttaaacaggcgtgcagaagacgtccggatccaagatcgtgagtgtaagattgccaggcgcagtggcgtgttggatatgctcactgtcgtgccacaggaataagtagataagcaaggggtccagtgggttacgaaccagattaaggccagatgcgagaccgctgggatcacgtactcggcatcgaaatgggcagcgttttggggatactttcaccggacctggattgtcaagttcccgccgaagttgtggaacgtcgaaccgttcacacgtgacgctgtgaacagaacaaacaatccgcttgagcgcttcaaccgtgagatgaacgctgtattgccaggcccgcacaccaatctacctgactttgttgccggcatagagaagatagcgcggaggtatgccaacctgaagagcgacattgagttcggaagagcgcgccaaccatcgagaccacccatccgtctgtcacgtcctgttgccctccctgatattgcgcctacatcgagtgaacgtgccacggttgcagcagaagatgccgattctagcgacggaggagaaattaattgcctgcgggatgatgggagacgattggtgtagccgcagagaaatgtgtcgcgcccgatccagatgtcgacgctacagcgagttcaagatgccggaccaatttatgacgtcggtgatgaagcgattggaagtagcggtagcagtgtcgaaggagacagctcctaaggaactgagaggtagcagaaagagaccgaagttggaaagaatcaatatgcatttgaatataccgtttcttataaagctcacggggctgagtgcggaatgttgcgttgatcactgatctctgctgatactgccgaagcatctgtagaatgatggcagtagtggggggtgaagttcttgagctcggtgcgcatgctgagggtcggtcacgagggatgccaatggagccactaagactgccttgattgtagtctgcttgcagctgtaccaaggtttcctgctcaacaactcgatagaagttcacacgcgccgagttcaaagtgtccacactggtcatcgcgcgaaaaattctcggcaattcgccctcaacaacagcgtgctcgacgtcatctcgaatgcgagggcggttgcttgctgtcgaacccgccagtagtagatccgccagtggttcttgagtgggcagccggtgctgggtttcggttcgatttcttgtacgagagagccgtagttggcggcctgtacgagtacgctcgtccaagacgccgtcagttccttctgggaatgtggggtctgaggtggcctccatcatccgctctctttcgctgggctgcagtgctaaccaagcgcgccggagttttttgcctccgctaccacgaagccatctcgaatcacgatgacgacggtcctcttcgcgaagttgaaggcgctgatacggatattcttgttcgaggtcgttggctgcggagactgcgtagcgccagacggcttcgtgtacgcgcatggtatctggctagtgtggtggctgaatgaattgtgagaatggagcttcttgctgctcaacaatgacaagagggcaagttcttacttaaaaatagatgatcagataggataagtgtatcgaagatcgaatgaaaactatctaaatgtttatttaagtaaaaataggatcattgtagaacatcggatgtgagcgttaattataagtaaatggatacttcgtcagagtaagtatgaaagcctttatggttgtattgcctgaatagatttagatacaattgcagtgcagacaaaacctcaagtaccaatagaaaagcgtagtggccgtgttcgtattacttaaatccttaaggcgaaccaacagaatagagatcaaccttgcgaagaaatgaaattccatacagccactccagatcacactgctgaatgccctggttgaacgtagtctcgtcacttacaaacttttcgccttcgaagacgcgaatcactagacagtggcttactcggagcgaactgtatccagcacataaataaataccgtcttggagcgtcaagtcaatcagcttttgcaacgtacgtgacccgctgatcccgcctagtagattcgcgtccagcgtcccggtacttatttgcttgcattgcacgggcgtcttgtcaatagcgaacttaacgtagaacctgagctcaccgtagtgacaccccttggagaaatcggtttacctcgcgctgcacagtattccttgaacccactaaccacgtcggaggtgtgccagccagtgttgcctaagtggtccgcggcaagcccgacagcgtagaaggcacacataccctgcggtgatgcaccgatgtaatgcacgtgaccgttgttcctgcaaaatatgtagaaacttgtaatactggaggccttccatgcatcaaccacgtcacacgcctcgataaatccatcctccctcaaactccagctggcctcccaggtatcgtcccatctaaacccgtcctcacgatcacaccactgaacgcgatataaaacaccttggtcggaacttttacgatcaactatcgcgaaaacgcggtattcgtcggttcgctcatgtacaggattttgttttagtactgggagcactgggctactcggagtagccgtagcagggtacttgtacttgctcaaatccttggtatacacggctactttgcgaatcggagccctcagcatctgcgtacgcatcacaccacaccttttcccgactttcatcgcgctacggacacccatgcgaccaccatagtccctctgccgctcgcatcggtcgagctacgggctccacaggcggcgccatacggcatcatcttagcaagtgtcgagaaggcgagagcgggccgggtcacttgatcacttgcttgcgtttgctgaagtgagaagaagcagtgggtaaatcacgagaattgcgaatccatcagtccggcagttttgatagaattctgctaccgatggtagcctaccgtacttttaacaggaagaagtgctgtcttgggcggaactaagggtgccgcccccgcagttcaggcggatggaagcttcgcgaagcttccacagccgccctacatctgcatatctattctacggtgagtcgtacctacactgaccttctattggcttacctttctaccaatcagatacactcaccccttctctggctgcgcgccctttcgacttgtcattcccgaaaaagacagagaaccgcgacgcttccggctgtcgcctgaggaattagtccgaccttgcttttccttcgcctcggcctggttgttggaggcttggattggttccttgggctgatagttgtgtcgctagcggtttctactgctgccggaatgcagtctcctgcttccgcgcgttctgcctcgcctccagcgacggctgatcatgatgttgaggctccgccgtctgcgtcgcctctggcgaccgcaaatctcgatggtccgtccatgctaccgcctggcgccgccacgccggcagactctgaatgcgccgccgcgctcgcgcagattgtcgatgttgtggccgctgctgatgaagtcagcgatgctgactccgggcttgacgaagagatgatgcgtgtgtgggaagaattagagctcaccagtcgctctcccggtcttggctctccagattcgggctctgcgtccccggcgctggcgacgcaggcgccagcgccgcgtgaggttgttgcttcggctggtggtttttctccacctacgcgcctccaggagttgatcttcatgctcgatgtggaagggttgtctgtcgaggaggcgatagctgctgagcctgcgcttggggcgacctttgaggcctcgcctgaagatgaatccgggcttttcgatgatagtgacgacgatgaaggcctgcctcaggttgaccgctcgcgcttgcggcgcggtgacgagaattcgacgtggcatccgatgctgcttcctccggcgcccaaaacgcacccgtcgaacaaccgcaagaaccactacgacccgaagaagccttgggattacaacactgaggttgacatcgtccgtgccttggatgtcaggggcacggctccgcaccgttgctacttggtgaaatgggaaggcaatccgctacagctaagctgggtctggatggagcagctcgacaaaccgtcgacgcgctacatgatgaggatggtggacgcttggaagggatcgggagacaagcgcaccttttgttattggtgattccgtgtcggaggctggtacttgttcatggatgctttccgctcggccttgtactatctcggacagccgggtctagtcacaatggagatgtgggatgcgtatgaagacacgcgacctgaagccatccagtacggtgtgtctcgcgacgacgtgacggagttcttcaaagttctgcagcgcaagagtgtgccactgaactacgacgtccttctccgaaacgctcttccagattcaagtgccaacatcacgacgctccaaggtgtttgccgcaaacaagcacctggtgtttacgtcgtcagcgctggccgcaatgatgtcgggcactgctttgtcgtggttaaccgtggtccggagaagcaacttctggctcttgacaatttcaatgcccgcaagaacccgccggtggacattcttcctctgagttaccagcagtggattcagcacgtgaaatggatggcgcaagtggagctgcaaccaggatacaagtgtcgccacggcaagcgcaagtcgaagacgcagaaaaagcgggagaagcgcatgaagcagcaggttctgcaacaagaggggatgtaatacgggaatacatgtaggcctttgagccccccttcagctgatcctgcttcaccgttttcgacgcttctttcgccttgcagattcaaattccgcgatgagatctgggacttgcgacaagttctccactggttcccaggtttgtttcgcctcgcccacccactccacaagatattggatccgccgtcttcgcgttcgctctccacgtaatgccttgacgatctggccaatgctgccgtccgctaagattacgtcgcttggcctcgacaagcgagtcggctccttgtacggcttcaatgacgaagtgttgaagacggaatacaccttgttgccagcctgggtgttgagttcgtacgcgtggttatgaatcttccgcaccacggcgtacggtccaatccacttgggtccgaacttggtggagttgggcaagccggagtgcttcgggtccagattcttcgtgctcaagtagaccctgtcaccaacttcgaagatctgctcaacacggtttcggtcgtagacgtcgcgcatccgttcttgggcctgagctaacgcttcgcgacagcgtaagagaatcgccgcctgtcgctcgtgaaactctgctctgcatcgactcttgggaacactctcaagttgctcggatgcaagttgaagtggattcaacggaatgtagcccagatcggcttcgaacggcgcaagcttcgtgctggagttgacagtcgagttgacagcgaactcagcgttggcgagataaacgtcccaatcatcttgaagtggaccgacgaagcaccgaagatactcttccaaggttcggttcatgcgctccgtttgtccgtcaccttgagcgcgatgtgcaacggtcatgcttagcttcgtcccgatggacttgaagacatgctgccagaaggcggacacgaacttcctgtcgcggtcggagacgatattcgtcggcatgccgtgtatcttccagatgttgtcgatgaagagtcgagcaacaccttcggcgttcatcgtcttggtggttggcacgaaatgacaccgcttggtcaaccgatcgacgacgacccagatagagtcgacgccccgctccgttcgcggcagatcagtgatgaagtccatggagatggatctccaacgctcgtctggaatactgagtggctcgagcaatccaggaggtttcgtcaaccgcggcttgtccctccgacaaggctcgcagtcggcgacaaacttctggatggacttcaacatcttcgaccagtaccaatggcgcgccagtgtcaagtacgtacgttcggcaccgggatggcctccgtagttggtgtcgtgacactcgctgataattgtctgtcgcaacttcacatcgttgggcacgacaatccgtggagcgtcatctgcaggcgtttgataccacagtaacccgttcgcttcggagtagcagcggtatttcttgtgctgctggtgttcgcgatttcgttttgagtcggatttgcgtcgcttgattgctgtcaagattgcttggacatcacgatctttcttgtacgctttcttgatgcgcgtaatcagctccgagtcacccgtttcttcgctgatcgcgaggctgaaggatgtgtcgtcgaagctggtcacccgtaagtcgtggaagaacttcgtctccggttgtaagtctgaccttcgacttaacgcgtctgcgatgccattcttcacaccgggaaggtacgagaacgtcgactggtattccgcaaggatgtcgtaccagcgagcgagtcgacggttggccatcttctgggtgaacagtccttcgagacttttgtgatctgtctcgacgatgggtggtttgtccaggcagtagatccgaaacgctgccagcgcatgaacgatcgctagtagctcctgctgctgagtcggatagttgagctccgccgacttcatcttccggcttgtgtacgctatcgggcgctcaactccgtccaccacttgaaaaaggactccaccgacagcaaacttgctggcgtcggtacgcagatgcatggggctgctgaaatccggcaagtgcaatactggcgggttgcacagtcgccgcttcaactccttgaagttcttccgctgctcgtcgctgagatgaatcttggcgttcagcttgtttttcttcttcaagagcgcaaacatggaggctgtcagagatgcgtactctggacagaatcgctggacgtaacctgtcaagccaaggaagctgtgaagcgcttcttgcgtccgtggtacagggcagtccttgatggtctgcaccttgtctggatccatccgaactccatttcgccctacgaaatctccgagacacgggatctcgtcggagcagaagacacacttggacagcttgacgtacaacttgttatcacgcaagatgtcaagtgttttccgcagtgcgtccagatggtcctcgatcttcggtgacttggtgaaaacatagatgtcatcgtagaacgacttcgtgttcttcaagtctcgaaagagcttcgatgtcaatctgtgcatcgttgctggcgcgttgcaaactcccattggaagaacgagatactcccagagaccgttcggcgcttggaatgcggtaaacttgatgtcttcttcctgcatgagcacttggtagtacgcggacatcaggtccatcgtggagaaccagtacgcaccggacatggcgtcaaggatgtcttccttcctcgtcatcgggatactttgacgcacggtgttcgagttcaagtaccggtagtcgtgaacaattctccagccaactggtttccggacacagaatgttggggctgcgtggggactgatgcttggtcgaatgagcttcttcttcaccatgtcttcgacagcgcacgatttcacgctgctgctccggtgactgtcgccactgctgccggtacatcgccatatttggatccttcacatcgatccggtgttcgatgtcacgcttctctggtaaaccttcgggtagttctggacgaaacacgttgtccttatactccatgagaagattgaaagctggattctctcggaaggtgtcccagtctgtctccagatagcgttgtgctttcgcactcccaacgttgtcgggctgatctcggcgttgcagtgaacgtgcaacttgcttgatcgtctcgttcgacaacaccaacatgaagtcaggcttgtcgcacgtcttggtcttgattgtcaggaacttccgcaacttcttgcgcgtgatgtatttggtctgtataccactctcgtcgacaactcccatcgtgaacatcttctccacggcgttgtctccacccctggtactgctgcttccattagcctcgactacagtactctcgcgctcagacgtcgcaacgtcgtcgtctccagctgaactcttgccagcttgcgcatcatcatgtcgtccgcggacaacacttggggatttcttgtgcactgcgtcaccaacagcttcaaccgtgagcgtcacatccgtttccagcgcggcacctcgacaggaatcgggtcttttcgccgacaggcctttcgcctcgacagatctccgaagcccggaggtaatcaccggtccgccttcctcgatcggctcacaggtcttccctgttcgcttccagtgcagagtcctcgttctcgtttctacgattcgtcgacctctccagtcaatatgtggttgcatgtcttcgaagaatggtattccaagaatgcaatcaaattcgtctggaatcgggtagacgactgccacacacttgtaggcgtcgtccagcctcgagaccagaatctctatcagcagaatttcaagctccgcctcgacaatttggttgtctcccagcttgacacgaatattcttgtcgctgaacttggttgtctgaagttggtgctcctcgacccaacgcttggatacgtagatcgtggtggctccacagtccaacaacatgcttcgtgtcgcgagacacttgtcaccaacactgatttcacctgttacggagaacagtggacgtgacttgtagaccagagggttttcgcacagaacgttcaagctgatattctcaatctttggtgtcccggttacgctctcgcccacgccaggaccctcattcactgacgtggttgctcgtttccctgcttatctttctccttcttccagaggaagcagttggccttgatgtggccaggcttcttgcagtgatagcaggtgcggtcatcagtacgtttggagtcagacctcggcttgaaccgtcccttgccgcggaaaggtttccctttgaatggcttgtcttgcttgggagcttgatcagcgaagatcttcctcttgtcttggcgggactgacggtcgcgcacgtcgtccacaaagtgtgtaacttcgtacttgatcgccaggtccatagccgcgctcagcgtctctgggttctcgagcttgacgtagctacgggtacgaggcttgagaccgtttgcgtagcttagcacctggccaagtacactcatgccctcaactcggaagataagagcagagtactcgccgttgtaggtctcgatgtccgccgtttgcttgagtcgctgcagcttttctcgcaagacggcctggtagttcgaagcttcgaagtgttggagcacatgctcacggaaaagcccccacgtgtgctcctcacttctcgtcgtcgatgaccagtgcaggaaccatcctgaggccggcttttccatcgccgacccggcgatacccggcagacgcgcgctcgcgtcttcgatttggattccgttgatgcgacaggcgttctcgatctggaacagccattcgcgaacgtcttcccccccccgcttgccggtgaacttgggcagattggtgggcactcgcgtgcgctctgccatcgcttgattcagccggtcgatctcggctcgtagctgggcgttcgtcggcatgggcttcttgtcgtcaggttgctgggaccaacaagtgctaccagtttaacaggaagaagtgctgtcttgggggagggcgtgcggaacgaagagtgccgcccccgcagttcaggcggatggaagcttcgcgaagttccacagccgccctacatctgcatatctattttaacttggtttcactatatctacggtgagtcgtacctaccctgacctcctattggcttacctttctaccaatcagatacagtactagtgagagaatgcgacgtttatactacatagtagtattgatggcgagtttacctggcccagcacatgtgaagcaataacatctgtatgtctcgactagcactgttcgtaattggctttttttgtttccgcgtcacaggcatcatatgtggcgaagtttttgtgcatgaactgagcctgaactgaactgcctctgacctgtaaaaaacgctaacacaaaatgtacttgggtgcagggtgagtgttggacgccgtagcgaaacagacaaaagtactccgtgcataccctccacaggtccctcttagctggagtgccagtaagcatgtcacggcgacgttattcaagcttgtcgatatcctcccgcagctctcgagtatacgcctccagggtgatggttaggtcacgctgcttctttctaaagcgggccatggtgatccccgccgctctctttccaaatcctttacattgagagcctggactgcgcttggagtctctcgcttgaagcccgacgctgctttggtgatgttcgccggagtcaatgaaggcggtgggtttttgcgagttggagcagcttcgagtgacgctgaacgatggagaccatcactcgcgcggggatggatagaagttttttcttcttgtgaagaggtggcaacgatgagctccctgctctggtggacagaccttttgcgtggtgccacgctgacatgactaactagctggctgttggggcataggaagctggaattcattcttgtacgatagtgattctgctgagtacagctcgatgcgaaaatatggtaaataatgaagcttgccgcttgcgtattttacgtatagataactcgcctgcgtactgagggtgtgttattcagacaggaatttgtagctttgcgctttctgaagcgtgagtttcttgatcccggaagtcccagactctccggttcgtctcctcgctgtgcactgcgaccgagagtttcctgtcgtcgtctcgtccaagtctactggtctacttcaactaagtacgaagttcggtatcgggctaagtgcggttcttctaagttcgccttaagttcggtcaacttcaatcatgccgggctacactgtggacccccagccgatcttcgaggtgatcagggcgcccgaaatgtccagctgggaccatgctgctctgatcgagtggctccatgagtgggaacgtcgagaagatgcgtcatcgctgcaccaccacgggcgagatgtacgagaacgtggtggccaccgtaaagggctgcgttaagcgcaagacgctcaagaacatggctacctacgtgctgaagaagccggtggcggacgtgaccgacgccgacatcgtgagagctgtgcaggttcggtgccgcaccctcaagaacgaattcgtgcctgacgtcatgtcgcggtttcgccagaagcttaagatagacctatcgattgatgactgcgatgcacgagtgttccgctactacgaggatgtcaatggtatcatcgaggacaacggcctgcaagggctgattggggcagacaacaccaccgacgctggctgcaagagcagaatgaaggctcggtgccacctattggttgaaaatctgcagcctccggtcgtcaaggcgcaaatcacccgtctaatcgatttagagaggcgtgaccgtaagtctgatgacgtcgccctctttgatctgacattggagcacgcgaaggtacaacagcggttccatcggatgtcgcaggactatgccgcaaagggggactcgaaggctgcaaagccagatcgtaagcctcagaagaccagcctcgccggcgcgagcgccaaagccgagtcagcgtgcccaacgccgtctgcagctcaaccgcctgcctccgcccgtgcaccacgaccgtctcggcctccgcctcaggttggctgcctggtgtgcaagggtgcacactggctcaaggactgccccacgacagccgacgcccagaaggaggccgcccggacgcggtatcaggccgagaaggagcctttcgctctaaagcagctcgcacgggtactacaacgaacatggtgcggatcaacgcgctactcgaagtaccgtacattgcggacacgggtgcagaccgaagtgtggtctccagcgccatgatggactctctacgtgctgttcagccagaccttcggaccaatttgctctcctcccccattagtgtgactcttgcggatgggcgaccggaattgtgcgatatggaagtggtgctggagaggaactaccatgatccactagaaaagtactggatcgcccccaggccgaccgaaaaacaaactactgtcacagtatttgccaagttcgtgatgcgtatttatcaagacgtatctacctactctctgcgagactggatccttgcgctgcgtcgtgtcggtcgtagatggcgagtccgacgtctccctcttgtcgattggtagacccagatgaagtcgatcgattcgcgttcgaaccgtaggttcaggcgcatcggaacgtggcttcccggttcccatgtaagctcccggtacccaacccattggatgagataatatactcttacgttgatccaccttttcgcgtatattcgctctacctcatatagctgcccatccacgcctctctgggcccttcgattgcttgcgaagaggccaccacccctacgtcgttcttctcggagtccacccccgactgatgattcttcctcttcctgctcgtcggtgtcttcgtcgctgacgtcatgagcggaaataccgggattcagtcggagacggtaaaacgagccgtccaggcggcgctggatgttccgggcgtggcgctgtcgtgggttaaggcgacaaagcagaatggggcttgccgaagcgctgaaaatgtagttcgcagtctatttctattctaagtgttgccttaaaataaatacagtagacttcagtccggaggtcaggttgtgatttggctaaatttaacgtagttaaattgcaaaattcagattgcagatcaacgtagcatattgtaccattgcggcttgaattatataaaaaagggtgtaccatggagtggtacattcgtagagttcctactccttctagagtttaagagattttcacgaaatattttactcgcgtgttcttagggcacaacactagagatctatcggtttagatttttaatatatcttacccaaatatgactcagcaacacttgcatatttggttagaattgtcggaaagcacaatatctataaattatgaagtgttgtttatcaaaaatacagatcgataaagtataaattggctttgcccgacgaagcttattcttgtccctacagcgcgtttttcacaatctttcgcttgtgttgtggcctcttccccggcttcaaccctcttttaccaatccgttcaggagtgggttcaagttgtggaggaagaattgtgtcgtcccgctgtaaggttgctgttgtcggccaagggagaaatttgaatgtgtacgtatcgcggaagtgctcgatcgacatacgcttggcgtcatacaagtcttcgattcgtcggccgtcctttgaagcagcgcaaattgcgtggacacaagggaacatttggtcttgacaattgccacacgtccacgcctgcgctggaaaatccatttcctggtctgggtgcacgtatccttttatggcaacagggcccttgaacaagacgctgtacgcacccccgagaaggggtgtaaactcgcacatatcagctgcagcttggcggtctgtacgtcgctctaacaacttggggactaaatccgagagtgcgccagattttgtccacgttacaatcatttgtcgccttttggacatcagttgactcagcttcaagaagtacaagtggaatccgtccaagggtttggcggtccgaagctctttacccatccagttgttcgcttgctctgacaaatttgtggttatttcgtcgaaagtcgggagattaaacttttcttggaaactgtacttcacccagtgagcacgttcgattctgtccagaaaattcgcagcggcagggttgttcacggcgagttcacttcgatacagcttatagtcattttcacagtcgctgcgtgccattcggcatacccacgcacggtcttcctgggacaacctggaacatttcctgttaatgttgtccatgatatgccgcaggcagtatcgatggccagcgtttgggaaaattgttgcgacagctggaagcagacctttttgtctatccgacaatatcgtgaacttttcccagtcaactgcctagttgaatgctcccaggaaccaaatccaattggccttgtcctcttgtgaaaccagcgcgagtccaactggaacgatgtggttgttgtagtctttcacggtagctaccagataaatgccctgttcgtgcatttcctctttaaggtggaccccgtcaaagccgaccatctttttgcagttctgggcaatgtgaataccagcgttagggatgaagcacgctcgaccaaacgacgatccgttcgcggcagtttccactctccaaaccgatccggggttcttgtgcgccatcaactcgaagtacgctcgcagtttttggtaactttctaccaagtcgccgtgaattttgtcgtcaattttctgcttcattctggacaccgatgtagcgcttacgtccgctccttttgatttcagaaaattcctgatagcggcgcctgacatagaagccgtagatccatcgtgggcgagaagcatctcggtcgcgacaatcgctgtcagcttgcttatctgctgcgtggtattccgcatgggcttggacggcaacgggatggacccttcaacacaagaggccttggcactaccaacgaacttgaggtgattgtgcgcaaaatttgcctgggttatcttccacttccccgatttcccgtgaacatacacgaaaaacggacacgtgagttgggcagctggtgtagtccggtcgaaatattgcgttccattgagcgccttgcacgccaatttcgcattaccggagttgtcggacttcacactggtctgcttcacaaaaatctggaagccgcacctcacagccaaatctttgcacttgctgtggactgctttttgtgaagaaaagactgaattggcaatattatctcggagctggtaggtcaagccatacgttgagcttgtcgggttcgtcgactcgactgcaacatcgtccctgagtagtcccaactccttggcagcttcgagatcagacacgtcgagtgaaaagcgagcagagccgtagtttggggggtttcttgctcttgacttggacatttgcacaatgcagcagaatatagctgtgaatcaccctttagagaattatttattattcaagtctacttggtttttatttagcactagccttcgaaatcttacctcccacgtatctatttcaggtgtcccgcaaataaactgagagctcgaagttagcccataaatggttgataggttcgcaagtggtgtgccgggcgtacttaggatttttttactgtatgaagaaaatggctgtcggcctgggggggcgatccagtacttttctactggatcatggtaattcctcggtgctggacctcgagctagtgaccatagccgggcccgtcagtctcggggcggtaccgtgtctaatcctggaaggcggtggagacgagttcctgctgggcaaggatgcgctcaagcgactgggaattgatgtggatcaggctctggccaagttagcagattccacattactggccgaagaggacgacgagtttccggtgggtgctgagctgccagaccaagactcgacaccaatcgcgactctggaccagttgctggagcgggctgttgcaaatggactcccccaggaacatgtggtagccgtgcgctagttacccgagctatttccggatatttggcgtgcggtggtttgtgctttgtcgcgtagaccggaggttgttaccaaagaggtaagtttattaatgaggaaaaacaaagcaaacaaattggcgggcctgggctaacttctgtcctgcattccaccttgtgctcttgcccaggtccggtcttcatgtaattgtgagcgcgtgcccgcgtccacttgaagcgtgtgccgcgtgctccaagcctagtacaatctcctaccgacgtccttctactgcctcactggtgctgtggcgcgtgccaggctgtcccctgcgtctctcactgggctccagctcgtgctcgtgcagaacttgcactggttgcactgcagccgaggcccaagcttgctcttcaaccgcaatcgtggcgacaatgtcgcgggaatgttgatgcgaagacttgcacgttctggtagaaggctcgcgcggccgggaaacacatcgatacgtagcgcaagctgccgagtaatttgttgattgtggataaagtgcagcggtcggacgtaaggagttccgtgattcgacactgtgccttcgtgattttgtcctccggtactgacacggtgccagactcggtgttgcacaggagaccgagggctttaatacacgttgaccactctgtgaacttttcctcattgatggcggtcggtcccagcacgacaggcattgtcctccgaagagccagatttgcttccatacaacaagtacccgtgtcgagttcgacacagatgtgatcgtcgcaccacacgtttccggtcaacaggttggtgtcgtgtgaatgctgggaccgctgctgttggtagaggctgttgatcagtagtaggctggtgagccacaccacccgaatccacatgaaagatcgagcacgatgactccttcaaactggaaggcgaacatgtgtacgtgaagagcgcttacaggaatatgacgaaaggccccagacacgtccccgagcatcgtcaggatcgggtgaccgggaaagcgagtcttcagctcaaaaatccggcgcgcgatatcactcgggttgtatgcgatcttaggaaagtcagtgcggtcggtgaagtcgttcacgaaggcaccctccgggaatgaataatcgttgactcgaatcgcggaagaagtgccgggtttatccacgactccagcaggacttaagaagatgttaccccacagctccagtaagtctgcctccataatcaggtagcggccttgttgctggcctttagcgatgtgctcacgtatttgacccgcatgagcatcgatagacttgtgacttgatggccgcgcgagctgctggcgaggtgtacttggacgccataacggcataacaccttctcttacgactgcgttccatcgaggtgtgaggtgtcgaagcccaggatcagacgggagcgggagctcgaacaagtctttgttgggtcttgggtcgcttggtgtctggtccctatacacgcggacgaagtcggacagcgctaagccgcacctgcaggcgagttgcgagtcagcttgaatgcggtgaacgtcgaggcgtccgttgtgcgatgctgctaaatgtgggatgttcacgtcgaacttggcggcgtactgctgacatcgtcggttgcggtccctgaccagtgcttggtgcactgctaactgggaactagtggacgtttgatgagcagcatgacattgttggctgaattccgatttgtattctgttggtgtcgtggtatttgttgactgactatcgagagctagtgctccccatagcccgatagcatgtgctctcggatgaacactgggagcctgtactcctgatgtggatgctgactgcccagcacctggagcctgtactcctgacgtggaagctgtctgccgcgggcgagatgcgtaggctgctggcaccactgtccccccgagaccgagcatcagtgcaccctggtccggttggggcgacgtcgtttggcgtcacagatcctggaatgctggtgccagaccgagaaagtttttgtcgataaagcttttggcgtcggctgggagtgcgagccgcttgaagtgggctctgttagggtcaaagcactgtcccggagctgggccggtgcaccccttctgagaaaggtagagcatgcacagtgtttttctgtcttgcttgggtagcatggcgagtaggtctcgtggaacggatgacggctttggcgtacggaactcgcggcttgaactggggcgcgtgctgccgggcgtgcgacttggtttaacggctacttgtgcgcttcgttggcggtcctgtagtgcttggaagagctccagaaggtgatcatcgtttcttgtgaactcttgacccacaagtgctgccgtctggaggtccgcagcaataatttgactgcggaatttgccgagcttggagttaatccagaacaccagcatgttgcaggttgctgcatctggacgcgacagcacagcaatacgttccataaatgtagcgccggctttgatgaagttgtagaccgtgctgttgtagaaaccttcggcaaacagtagcagcgtgttgaaggcgtcgacaatctcggtggtgttcgttggtgctggggcaggttaaagagcgttggatcggctgaagttcgtcatgttgctggtggctgacgtcgtgtgttgctcgagctcttggttgaagcgttgaaagggcatgaggtagagcccgcgaataccaaagctgagatcgtacgacaggcgaagtactggtggcgtccccaaaaacttggtccctgagccttgttgcgccgactataatacagcttgtgcattcttacctagtaacgacggatgcacgatcgcgttgtgaacttgcttctccatctgggacggtcgaaatgatgatgcgtgtgcctcggtgctggtaggaagtacgggtacgtcgctgtcgtctggcaggagcaggtcctcgtcttctacatcggcttctcgtgttcgtttgcgcagctgtcgattttgaagacgcaccaagtcgatgtccgcttgctccatcggtcttttcttcgtcctctgagtcactgcaggccaagttaacgtggttagtcagcgaactggcagctgccatgttgggacgaacggtggctgtcgttgggtctgttagcagaggatccttaaagacgtccgctgggttggggttccgtccgtcgagctcacagtccacgatgtgctgtcggcgaacgaatactatcgcgagtgtgtcgggtcggatgagaggtaccttctcgtctggaaacccatgtgctcgacggtaaagtctatccttcccttagatttttccttacgcctgtagaaactacagcagtaggtgacctttttggaggacgttccagccttcgtgtactggaagccgttcaacatgatgacggacttaaacttcgtgcgctggggctcggcgcgcaccaactcgtaagaggtgccatccgacgccgtctccgtcggaggcaagcttggctgaggcgaatccaggctccctccagtcgagtaggccgacagaggggaggggggtagcggcgacagggacggtttgaacggcgccaacagctgtgggcccgtttggggcgtcgttcccgtcgaagccgactcgcgcaatctccgtcccaacgctgataggcaaggcgatgacagcggcgtcaccaccggtgacgacggaggagacggtgtgagcgctgccacaaagctcgctggtatcttcgacaccacgggactcgaaggcgcagacgaagctggactcgatggcgccgaggacgctggactggctagggccatggctagctgtcgcttggtgcgcgttcgcgctcggggtgatgcaggctgttgttaagcaaccttgcgcggaagcttggaccccttggcgactttggtggtggtcgtcttcgtacgcttggccatgctgatagtagaaggcagggccggttcagtagggtagtttagcttgcgtggcaaagccaaactgaagcaaaacgtggcaaaacttagcaaacgagatccaatcactggttcatagagaaagtactatcacatcaaatctaacacctgttccccaaaagacccatttaaaaatcttgcaaaccgttttctttgcgatcttccggaaggaactaatacgactggtatctcagttaattcccgtggtagtatgggtaaaggaatcgctactcgaaaacaagaaaaatggcttctttgttccaagatctgtatattcctctgatcgacgcactactgtagctttgtactgccattgtggagttgggtgacccatgtttacaacggatacgctaccgagaggataatgtagaaattgtcttcatttccattaaatggaaatgacaacaaatttagttgtcagagaccagaacttgcagttaatgcaaggcgcagtatgcagcttcatcggtgactatttggtctagctcaggcatactcaggctatgcgacgatcattacctgcagtatttgactatcaagtgcaaacatgtacattgatgtattccttgaatggcccgtgagaaaaagaaaagttattcttcttgagagcgaatatttagcttttcagaggtaatgcagccgtgggggcgcagtcaaattgtgttcggatacgtgtaaggcccgtgttggagctagataaaaccccagggagtggtgcactgggttgtcggcttttagcgcgttgaaagtttgggaatgactgcatctacactacactgaatagccggccttgatcttgtaggccagggtggtcttttccactcgcacttgccatcttgtatctgaaaaaaggccttccgtggaattaacgcaggaaaccatccatagagaaacgtgcagtcgtttaacctctataggtgttttgtacaagggtagcggtggaaaacccatttttcgagagaagaagtgagccacgttttcaagcccgaactcgacaccacaacagaccacggatttgcacctaggctttgcctggccaggagtagacagcttacttttagttttagggggcggcgttcctcagctacctagcttgcatgcaggccaactagctgaccgactataagagccgccccctaccatggcgcgttagcagccgctgtgtcttccagcacctccgcccctgcgtctcctccatgctgtcggtggcctcagcggcagaaccggccctcagctcagcagccgcaaccacgatcagcccagtccggcacaagccctcccaagcccaaacagcctaccttcagcccgcgcccatcaagccggctaagtccccatgaagcatccgtccttgcgccgacattgcagccctcacagcgcgtggtgacggaactagccccgtccccagttccccgccgcagcacctacgccgtcagcacctgtccaagcaccagcagcccaagcttccgctccgccgtcggctgccattgcgcccccataagaccttgggcgaccctcttcaaggcggcacacgtcaccagtgccaatactgccccaacgtcatatcatcaagaagtctggttcaggctacacgaacctggtacatgtaccaatgacaaacacagcagagactacgtcggcttaacacttgctgcgggtcggagattcagaagctacaggacagcgtctcgtatcttctgaacctcgtgggttccgagtacgaacacctatcctctttatatacgctcagactctcagcaaccagggagccacccgcctcgtgactttcagcacgagtggtcgggatgcactcgccaatctgcgccgtggagctcaattcgcctggaggaccaatcagcgggcagcctgacgatagagccggtccggccaatccgagcgcgctggcgagcactgattgaccccttccaggccggagctccagcggacggcgtatacctggccggtgtgcatgcatgccacggccggcagcaggcgcggcgtggcgaagcaaatcgcagtgacagggatccagactcgggaaaggcgacgacatgtcgccgcacatagcgctggtggggcgctcaaaggtggcccgcaacacattgtgacgaaggaacgcaagtcggcccagcggagacgcgcaagcggaggccagaagctgctgaaggagcagcaggaccgcgacggaagtcaagtataccgtttcaactactcggcggggcacggagagatgtgagctcggtgttgacggtgagagtcattaaagcaacattgaaaatcagcctcaatgtgtgggatcaataacattggtggggtccaatgttgcgtgatcgctaacattgacgcaatgtaaattttccagacgtgaaatttcatgtttggagcgactggctcacaacagctctcatttcagaatctaccgggtaggaagcaagcgcctgcgcgctcgctcatgcaccgcgtcgtgcgaccgtctgcagcggttacccgctcaaccttattctaatgtgtgcatgtcctactgcggtgcttatatgcgtgtgtgtactacgtatgcgggagcaaacgccttcccagtgcgttgcgttgcgttaggcgcgatgcgtgttgcatgcgttcgaatgcgctatcttccgagtagtcgtaagcgcttttaatgcgcctctagccaacagcgcagttaggttaaagggggagggcgagcgaacgcgagcgcgagcctcgctgagcgcgttcaccgatcgtcaacacccgccgatcaggcgggggcgggtctgcgcgagcgagcgaaggcgagcgctgcaacccgacatttttttatagacaccgcgcctggcggagccgaggacttagcgtaaggcacgagggcgtggggcacnnnnnnnnnnnnnnnnnnnnnnnnnnnnnnnnnnnnnnnnnnnnnnnnnnnnnnnnnnnnnnnnnnnnnnnnnnnnnnnnnnnnnnnnnnnnnnnnnnnntccaatgttgcgtgatcgctaacattgacgcaatgtaaattttccagacgtgaaatttcatgtttggagcgactggctcacaacagctctcatttcagaatctaccgggtaggaagcaagcgcctgcgcgctcgctcatgcaccgcgtcgtgcgaccgtctgcagcggtcacccgctcaaccttattctaatgtgtgcatgtcctactgcggtgcttatatgcgtgtgtgtactacgtatgcgggagcaaacgccttcccagtgcgttgcgttgcgttaggcgcgatgcgtgttgcatgcgttcgaatgcgctatcttccgagtagtcgtaagcgcttttaatgcgcctctagccaacagcgcagttaggttaaagggggagggcgagcgaacgcgagcgcgagcctcgctgagcgcgttcaccgatcgtcaacacccgccgatcaggcgggggcgggtctgcgcgagcgagcgaaggcgagcgctgcaacccgacatttttttatagacaccgcgcctggcggagccgaggacttagcgtaaggcacgagggcgtggggcacgccgcgcagcgtcgccccccgagcgaagcgagagacgggcgggccccccgaagtgccgtcgctaagtccgcaggcgaaagccaacgcgagtgtcctgacaactaggaatagacaacacgtggcgcccaggtagagctgcgcgtagatcccgtagagcccattcccctgctgcatgtgtcggcgcgtacaccatgacgtgcttgccgcgttagcggcggaagctgttggcgcgtgatacagcctgcttcgctgttgtgctgtcgagctgtcgagctgtcgtccactattgtcacattggtaaaccaaatattctgctacgagagataccgtaacattgtgcaatgttaggcagaggcaccattgttgcgctcaatgttacgcaacgccaacatttcaatgttgctttaatcagtgcctatcacgacatccttgggtgacactgccgtctgaccaagcagcatgaaatgactgtgctgtacagtacagcacagtcatttcacttctaacatcccaagtatgacagcccccgtcggtcgtcgcaaggcaccaaggtgcatcatgccggagtgcaccaagcaggtgcaaactcgccgactttgcaaggcgcacggtggaggcgtgcgatgtagctccccgggatgctccaagctcgctcaaagtcaacgactttgcgtcgcccatggcggtggtcggcgctgccgttccaccggctgcatcaaacttgcgcagtacaaaggcttgtgcctcgcacacggaggcggaagacgttgccgtgtgccggtctgcctcaaatacgtccaagtgcgcgggtgttgcaaggcccacgccaaacttcagagcgaagtgaacacgtctctaacgttcgcgtagcccgctaactcgactcaaaaggaggtcgtggatgtccactgcgaatcggttagagtcgtgccagccacccggccttgacgacctcagagactgaagacatgttcaactcccccaagaccccggcgaccgactggttcgctgttaactcgccacgcagcgagcctgcgtgttcccggggtagatgatagcttccccctgagcgtgcagtttggtatggatgatgagccagggccaccgctatatgattggccgtcaccgtcggcgacagccctccagtactcgtgtatcgtccagcttgtcggcagctgtactaccaacgcaggaaggtacacctatcgttgcacaagaattaaaacttgcgtgtatatacaagtattttgatttaccaaacaaaaaagtttaagcgcaataaggtcaagtctaggtttctcttctggatgtggctctagttcgtgcgtggtttcttgcagatattgtggataaggttaccgtatgtagcggcaaggcgactagaatgaaagcgtgactgctagcgatactgggcgctgctgtgttttgagtaagcttcctgagttgaccaggcaatgatacccaccgcgaacagactttgtaagaaccacgcggggtgagtaatacacattagatgtagactacctaaactatcgatgacctcaacttagtgttcgcgcaaacaattactgtgttgctattgtgagaaccggctaaaacgcccatctgtagcaaccccttattagatttcaaccacttattgtgctttgcacgaactttggcatgcgattaagggctctaaaccaacgagcaaatccttcccggtgatcatatctcgcagcctaactctaagttaaagttaagctaatcaaccgccagtaccaagcacaacgcagagcaagaacggagcggttgccatgttggaaaacactgcaagttgctgctgttgaagttgcagggaactgctgttggagcagatacgggacgagtcagttgaggtagtgtagactaacggtcgcatgcatgtctaggagagagggagaaggagtttggccgaggtcattccccagaagacctccaagtgaacaagttgcgttttgtgcgagtgagttttgtggtgccgcattccaacagccactgcaagaataaatcggttgtcgctgcaagaaaacaaactgataaggtccccgatagaatggcgccaactccttgcataatagtaagcaccgatttcggcggggacgttttctttcgctctcttcgtcgtggcgttaaccaagctcgaatttcagagcacggcatatagtagcagtagaaaatttctactagaaatgtttggtagtgcaggaaacgctgactttaaagctgcttgcagctcctcgatataaaaacagggatgttcttcaatagtgtagacgtagtttagtatgatagatcgccaacgcatgtcaatcatcgactagaaagcaatcagacaaagcgagcgagttagaattagaatgtcagggccgtagtattgtcggatttactccagccattcaacgaaagtgagcataactcaacgttaactcgctgtcttagcagctattctatcttaaatcgacgagttagcctcctaactcaatgatgggctaatcaccgtgatttgctaaaacaacgaattacgtcgttgtttagacagaaagcatgcaatgcacaataattaatcagagtacaaatcagggctgaaatcgatcgagatgcatcgattggctgcgcgattgcccagtaaaaggtgggcattctgctccaaacgtggctataccgacttgactcccacaaaaacgatcgcctaatctgcacatccactcacgtatgcatcgcaggacgcgatggatttacgaatccatcgagtaaaatcagggtgctaatcgatcgatttacgaccaaaataggcaaaagaagcgggtttcacaataacactagcgtttgaaactttttaatgtatcgtgaacctggctaacatggttgctgagttagattgaggctcgtttatctaccgaaagctgactggtgcgaaacggtcgtccttacttttaagtatatttcccagaattttgagttattattgtggaagccctacgtgtcgtggaggcagtaaagaatggcgaagactctcgtggttgcctgccgtggcgtgttgcggatcgaatagccgtgaaataccacgtcacgcacggcgcactacctggacgacctacgtgtagcgacagtcaatggaaattggtagagcgaatgtgtatgttggagccgcaggagcgtacgcccacgatattaccagagtaattcgtataagagtataattattggtatagacgagaagaacttctcggtgggtgctacttaattgtgagtacacttcactgacttccgagtaattccacaaatcttacttgtgcctcaggaaaaatgccatgcccggcatcgtcaccttggacgagaccagaggaaggcacaatacgaatgtatctggggaagtaacgcatcgatcctcttatgcggacgtgagcaaactaatagataattcaagcgtcatctagcagaaaaaaagaaaaaagtcctaaagggtttgtagtacgtttatttggcctcgtgaatggtatcccaacaaaaaaaatctttagagaggattcattaattacaagttggtacagcccacgagatcaagtgaagtttatgtactcgaaagtccgagtacattgcttcacatacccagagaatagacatctgacgcaaaggttgggccagcttgctgttgggctcctcctgccttgttggctggaaaacattcgggagccacccaatgccacgcacctgagatctgtaccgagttatcgctgctagcggcagagctgaaaccgaagtccgtcacttttgctttcctcaagcgatgtcaggtggttcgtactcgccacccacgaggtcggcagatacagggcgggggccctgcacctcctgttgccgtcggctgctgtccaaatggagacttgacttgagcgttaatcgcgttcgtccggcgcgtgctgtaggatgcgtgggcctgggctcgaactaacattgtatcggattagagaggtaacagtaccgtaggtatcattcgcatgtttaaggtcataataggatagagcagatgtagggtgattgtgaaagcttctagaaaggagcttccatccactcgaactgcggggacggtcactttttgtttagacccgccatccccccaagcctggcttcctcttcgttttgatatactggtagcacttgttggtccaagcaacctgacaacgaggagcccatgcccaccatcgcccaactacgcgccgagatcggtcggctgaaccaagcgatggcgagccgcacgcgagtgccgagcaacctgccgaagttcaccggcaagcgaggggaggctgtccgcgaatggctgttccagatcgagaacgcctgtcgaacaccatcccgatcgaagacgcaagcacccgacttccaggaatcgcggggtggcattggagaagcctgcctccggctggttcctgcactggtcgtcgacgaatcgaagcgaggagcacacgtgggggattttccgtgagcatgtgctccaacacttcgaggcgtcgaactaccaagctgtcttgcgcgagaagcttcagtgactcaagcacatcaagaccaactactttctctggaagaaagagcaggatagacagggaaacgggcaaccacgtcagtgaaggagggtcttgtcatggccgagagcgtaaccagaacacttccgattgagaatatcagccttaacgttctgtgtgaaaaccctctggtctacaagtcacgtccgctgttctcagtaacgggtgagatcagcgtgggtgacaagtgtctcgctacatgcagcatgttgctggactgtggagtcaccacggtctacgtgtcgaagcgttgggtcgaggagcaccagcttcagacaaccaagttcagcgacaagaacattcgcgtgaagcttggagacaaccaaatcgtgtaagcggagctggaagttctgccgttgaagatccatgtgtcgggtcttgacgaggcgtaccagtgtgtcgccgtcgtctatgcgatacccgacgaattcgactgcatcctcgggatacccttctttgaggacacgcagccccagattgactggagaggtcgacgaattgaaggaacaagagagaagactctgcactggaagcgagcaggtgacacctgtgggccgatcgaggaaggtggaccggtgattgcctccgggaggtacctcgacggcaacagcgggaaggtggagtactaccacaacttcattttcgccgctactgccctgcagttgaccggagacaaaggtgagtaccaggatctcatcacgtgggagcagctttctgacgcggcacgcaacgcgctgatcgaaaaggattggggcacaacccttttcgacttgatcggagccaagatgcctttgaaggaccaaaatttcaacaagaccctcaaggcggcgttcccgttctaagcgggtggtgccgaactctacgatgacagcacgatagaagtgcgtcttctagataaatatacgtaacttgcgaagaagaagttttttttgtcttcgccgtacgctgagcttcgcactttctcctgcttgtattgcgcaaagtagctttgaatgcaggacgaatgctactgcactggtaaacgtacctctagtccggtatcgacaactgagtcgagtatcggggcaaagtacacgttttctttcatctctcgagaaaacttctataaaaattgacagtagggcctcttctttgaaaaaaagggtcgtagtgtcaattttactctgattggataaaaattgccattgtgatatactattggtcaatattgagtttgatgcagattttaccctaattaagtgcgctaccaaagggtattgatccgctacacgtatacttaagtaacaattaaacggagcacaacgcgagatgctgaagtattttatgaagcattgtgagctcaagcttcgacccgagttcacgcaggcttgcttacgctgaagcagctggcgagagggaatacgccttgtagtgcgtgattgtaaaggtgcatcaagacatgcacccgtacaggaaattggcaatggcaagctgccaagtgattctaggcaatcatggcgaaggccgagactgtttcaatagtacatgtacgtactgtaactccgatcttcctgaagatgcagacttggacgcaccctgcctcattattccacagcatccggtgcagtagggcaagcaccttctccggaccaaacgcgccacttgcattcaacgtaacatcctatcgcaggcgacacaagccgtgcaggtctgtatgcgagctcgactaaggccgcagcggccgtcagctcttgaccggtgttgtccacttgaagccttttgttcaacattattatgctccaacatctgtatacttgttgattcggagccagaaagcgacatcctggacgtccagactatccaaaaacatgaagcacgagatgtgttttcggtctcgctcgcgaatcaaaatgcaggacgtgattgaggttccgccctcgacgcgtctaccgaccgatatccggtgttagcatttggatgtggttgtccgtgtggtgccgttcagacgcgagtggtcgtctccgttcgactgttgagctcattcactaacttgcctcgctgccgctaagccgacaaacgctagactcaagacccaacaatgcgtctgcactacgctcttctggtggtcgtggccgtccttgcgacgtgcagcagcgccgccgcggtgactggagcagcggacgacgtcaaaatcctggccactacgtcggagacccgattcctgcgcgcggctgacactaagactgcggacgacacgagcaccatcaaccccaagggcgagttcatcgaacacaagctgcagcgagcgctgaccaacccgaagaagacgcagaggctctacaagacgtggtacaacaagggatataccgcgaaggacgtcgccaaccagcttgacgacaatgagagcagagagctcgaggcgacgtacaaggcgctctacacgggctacgccgcctacgtcaaggagcagcagtcgaaacaatgaatgctaaatgctacaccgatagagaaataacgattatcaagtacacagttgcaaactcgtagccactatttgttaagtttccgggtactgttccgaccaccgagctcaggacgactcagttccaatttctcactcttaatctaggcaaccgaaccgctaagcactgtgggaagtaccgccacttctccattcaactcgcgtgttttggtctctcgggtctgtcgtcatgaatgttgcatggcgctattgccctcggtccatttgaactgcataacggcgccacgcctacatctgtagcttcatccttagccatccgatgttgtctgggacttgtcttcctccagtggtgagcagcttggttcacacacctattgagcgcattatcgctgcggtacggaaagctgctgttcgtgaggacggcggtgcagcagaaatgagcacttacagcctgacgtatgtgacctatttggtattcttctcaatccgctcaacaatgcggaactgtgggaactgtactgcactgtgtcgcactggttggaaatgcatggtcgacagctctgttgttcagcggctggtctgccgttcttccgtgttcgagtgtctacatgtattcagcgtcgtgttcgcacgtacactactgtactgtacgaatagattgcgccttcctgcgaagcatccagagcttcaccggctagtaatttacgcgcggaagcagaccattacagcgcattcacgaggcgacacaatcagtgcgatttgtctataaacggttagatttcgatccaaagctttgacgggctgtggacgacttgagccgcgttgtcatttcgcaacgctggcgctccattcatattgtccacagtatctgcacctgtgcacaaatacgtacgcatcacttgttcattcagacaacaccgtaatctttcccgcattagctgtacctcagacgtttcacccccacgttccgacggctggaggcaagcgcgtttcccggtgttgatggtcttccgttcactggcgtcgcgtcgccggatctgcttctcagtttcctggccgacaggagctcattctcaatttcctgagcaacatccaagccccaatagcccccaactaatcatgcgcctccagtttttcttggtgatggccgtggccactctcgccactatttcggcaacaagagtccccgacgatgccaatctccagtccgttaatgctccagttcagacagtgacaagaagcagacgattcctgcgtactgctgatacggatattgtctacgagcccaaagttcataatcctggcaagaagcaagtgttcatcgaagacaagcttcagaaggcgctgacagaccccaagaagaacaagaaactgtacgcgcggtggtacaacagcggatttaccgtgaagcaagtcgagggtggattggaccagaacgagaacagagagctcgagctgacgtacaagaacctcgcgctgggctatgccaagtactatcaagcccggcgatcgcaagaggccaagtgagggaggaaaaatacgatacgattatagtggagcaagcaaggatttacccgttggtaggtaaaatccgtcgaagagttggctcaggcagttttgtgatgtgaatttaacgtggaagtacaggtggacttcatttactcgtgagcctgtctgtttggtcgctggaatagcattcgcaagagcgataattcactttcgcgccaatgcacaatgagttgcggtgaaattgtaatctttcttcgtaatgatagcgccttgaccggggcattcgccactctataatcagtcttgctcattcctttctgtttcctctccatactgatgatcaaccttttgacgtttgatcgtggcaaggggggacacgtgctctacctaggctcgttaaactaggtgactgtcatcacgagttattgggcgttcgcgtgccgttgttttatcggacccgctggtccgcgggctcagtacgccttgtgttcgtaccaggtggtgtatgtccaacaaccgtcgaaatattgcgttggagtcctcgcccttgactatggggcctcatcatcatgcggcgcgtgacgccaagaattcaactgggatgcgaaaggaaggcttttataggcgacggcgttccaagccaccgactcgtcgaaagccgattctgcgccacaagactcaagtaaataccgtctccgattagccatgacgccagctcgcagagttcgcagcaaggtgccacgatgcagtttccccgattgcaagaagcaagtgcagacccgtaaactatgcaaggctcacggtggaggagttcgctgtcgtggccccgactgcaccaagttggcgcaaagccgaggcctcgcgttgcgcacggtggcggatgccgctgtacggtcagtggctgtcccaagttggcgcagtccagggggttgtgcctcactcacggtggcggtcaacgctgccgcgagccagccaaaagtttgtacaactcaaagggcgatgcaaggcacacgcgaaggctttagcgagaagtgacgacgcacagcccatattaaagaatgcaggatccaagttctccatcgcattcctcgtgaacccactcgaatcgcctgtgttgccttccgatggagacgatagcaagttatgcagcgcggtagataggtgagagagcaattgtcttcgtcagcaaatgaagttctatcattagtggcacaattatattgatacgaactctcacaatagttcttcaaagaaatacccctctctgtatgaagccggtcatcaatcttgattcttttcgtcatatacaagaactaaaacgttagccgagaagaacgattagtattctgtcggccgaatcatgctaatttcttataagctattttttgcgtggaaggcaatccatgagctacagcaaatacatgtacagaccctgcgtcgaaagattcgcctactatttcttcccgatgtttcgagttggagcatcgaaaatagtaaccaacgccatttgccgcgaagtgaacaaaacgaggaatttggttcgagcaagcagtatgcacagaattcaaagcattcagtataaaaaatatcatcgctggatttatatctgcagaacctttatttttcaaagaacgcagaagtgatgcgttcaatatctgcactgtaaggtgccgcaactatagaagcagggtcgattggctagcttctaagcattaaactcgacaagctggccggccaccctagaaaatgccctttacccacgaaaccgccttttgcgtcaacttgtactgcacgaaatgcgtcgccacgaaatcgaacagacccctctccttgctgccagagccagactttgtcttcttctccagctgcccgaagtcgtagaccttggacggatctgtgggtgtcgaatccgagacccgcgagaggctgttcttgtcgatagtaattaccatcgtgccggtgatgaacggcaccttgtacacgaacatgtcgttgccgtcgtcctcagcgagctcccgatgcggatcaagattcgacggtcgcagacacgaggccgttgttgcacgcagcgagagcaacgcacgtcgctagcaggacttgggtgatttgcatcgtgaatggggcgacgatcagcacgcgcatgacgatagcttgcacaaactcccagttcgcacttgttaaatattccagtagaacgaacgggagttcatgcactgctaccaataaatagagggtgaactccaatttacgcttcgccaacacccgtgcagctccacaagacagcgatagatagaagaagcgaaagaccagcacgaacgcgagcgagagagactccacccaattctccagttcgtgcattctcgtgcccagattgacgcccgcgacttcgagcgcagtcccgagcacgtcgatccaactcgcgaggatcagcacctcggcagcgtgcgtgaagtggacgatagagcgaagcttgactttcttggatacatcgcgaccgatgatcgtgatctggatcgtgaacgtcagctgcagacacgtctccgagatgtcgttaaactcccacagcgtctcgtatgtctcgtgggagtaaatgtgcgcgataaaggcgagaaaggaggccacgaacaacattttcactcggaactcgcgacgccgcagccaatagacaaacaccaggtactggaacacccaggcgtcgagcaccaacacaatcgggaggaggattcccctcgacaagtcttccagtttttcttgcgtaatagtcatccagcttcaccgtggaaggttccacggaacctaacgtggtggtcgatatggttgacgttaagtagctctgcgagtgctgtcgtcatgcataacgtgcttggtgctggcaaatgaatagcgcatgctgcgtccagctaccattctaatcagccatgcgctttgggtcagaacttgaggctgaatgcgtaagccgttgatcacaaggctgtgacggtattcctgtgtccttgtcgatgtggtgtatttgcacggaattcgtagctgagcgagacggtattttagttaaataaaaaataaatggtggttgtttcgggagaatattattatctgttgctaatctactgacgcatctgttgtaagcaaatcaacggaaaacctgttgcccgtgtcgggttatctgttgcgggtgtaggggagctaagcaacaggttttccgtgatgaaaatgcacaacagatactatgaatgagcctcctggattatctgtcacatcgcactacaccatgtagtcgaatgacagccggagtgcttgcgctgtagtatatttctatggccaagatatgctgatactacattatcaacgtgatgcccttcatacgtcgagtcatatcggaatttatttttgtgtgtatatttagatgcgcagtagtccagtggttacaaagctgttgtcttctccaggtctcactttccagcctgaggcatcatggaaggtagcgcttccgcggccgtgccttgcactagctcagctacaacggggaacgcacgctccgtggaggacaacgttggtgacagcgctgatgaggatgagcaactggactcgatttgccagcagctagattttggggacgacgacgaagttgagatcaatgtgggtgtagatcgcggtgctttagagttggtggaggctaccgtagcgaagtatgtgtcggtggggttctacgattcgctacagggggcgaccgtggcactacagcaacacaacgagtttgaatacacctacaaaactcggtacacctccaaaaatgtcactgggactgagttcaaatgtcgctcgcatgctatgtgccccagccccctcaaaattgttgagcggaaacttggagctaacttagttcgatacgagttgttgcagaagggtgagcacggtgatgcttctgtctcgcgcacgcggcatggtattgcagctgttcacaagtctgaaattgactcactattggagttaggtatgggagcaagtcgagtacgcaatatgttgttgcacaaatatcgacgcgatcctgaccttttgaatttggtgcctgaggttcgtaagatcgagaatagaaaagcgactatcaagaaaaatatggaggaaggctgggatattgacgacttcaacacaattgacatctgggcacactcgcgattgtgtcaaacccgtgaagttttcgactctgccgacgagtcagacttcgcaaagatgaacgagttgctcgtgctcgagcgcttccagcacaattttgacgacaacggaaaaacgaaagcttcgctcggcttaatcatgacctcgcgagcgctatttcgtaacgtggcaaaagcgacaacctctcagagaggcagtcttgcgatgtcgacggacggcacataccgaattccattgtggcaattggacgttggtggattgcggtaggatctctgttgaatgggagacaactcaccatgttcagcgatttaggccctggctgtacatgtttgtccggtcggagtgcacttttgcatacgagcaaatgttcggtgcgctcattaaatacggacgcatgtttcttgacgttgacgtgaatttagcttgctgcagtatcgatcactgcagtgctatagctcgtgcgctggagaccgtctggccggaagtgatcattttgtcctgttgggaacatcttctggggcaggccagaaagcagcgctcaaagctagtcggcaaaagcttctacaagaagtacgcacttcctcagctgaagtggcttcgcgaaacgcgctccctaaatcaatttcgcaatctctcgaagtgcgttgtgcggtggtggaagttaaaaggagagaccgcgtatgcggagtggctagaagatgtttacctcacatcgcgatgggagcggtggagcgtaaacagcagtccgataccaggagtcttgccaacacagcaggccattgagagccaccacaaagtgataaaagaggtgatcacagcctttgagaaggccccgacgattcacgtattaaactctgctctgcccagactcttaattcttggttcggatacgttatcggacggccctcagggttatttctgcgaatgtgagtaaattacatgctttgaattgtgacattatactaacgcgtgctgctaaattacacttgcacaggccctttgccgaaggatgcagtctctaaggccaagttgttactgacgttgccagaaaatcatcgtgaaataacggagcccggccaacgtggcattcccgttcgaatcgtatccaacagtggtaacgccattgtgcgttcgaagaacttggctgggtctacggtcactaccacgcgctcgaaaacgtacgtttaaatattgcgtttactttctaccaggttcattatgctaattgatgattatatacagctttgtttcgtcgctagaaggtagtacaggaagactgcgcccatctttgatatttggacgaagtttctttcattgcaacaggtgtcggtcaacgtcgagcgcgcacgagcgatgccagagtttcaacttcgccctacttggcctttatccgacgtaagattcatgttccatctgaatttattgtttctgagtctaatatcttacgatggcacctgaacattgaaatggttcgagatacactccgatgcacctgcaagagttacatgcactctggctgggtctgctcgcatgtgattgcctccctcaaactgctgaaaaagctagatttggagcttgcaacagaagttatccaagcacggaggtctccaggccgacctcgagcaccggttggagcccgtcaacaagagccggcatctaccaacttttgggatcccgatcggcttgaagcccttcttaccaaagagccttacactcctttgcagtgggctttcattacacaagttgacgttcaaaaggaaggccaagcttctacttttcgcgaagatcgtattggtacagttggcggtgttcgactgtcggaggaagacggggttttcgagtggagcgtggccttcgttcacggcgacgtgcaatactaccaagtagacgacttggtgcccggactgatacgtgcacacgagcagcgaaatatttaggcatctactctgttgccgccacagcctcaaattgcatttcgattagcattcatggatacaacacatataccgactacactctacttgttatctgttgcgcattttcatcgcggaaaacctgttgcttagccctacacccgcaatagataacccgacacgggcaacaggttttccgttgatttgcttgcaacagatgcgtcagtagattagcaacacctaataattacgccccaacttgacatcagctcgcgcgcgctccgggagcacatggcccccgtgatccagaagcacgtgcgcgtgctgcagcgcgtgctcacggacgtcgcagcggctaagatgcccatcgacatgttcaattactcggggcggttcacgctggacgcgttcggggagatcgcgttcggcttcaacatgagcacgctcacgctgcagcgcgattagcacccgttcgagcgcgcgttcgtggacgcgcagcacatcgcggcctcgaggctcgtcgtgcccacgtggtactggaagctcaagcgctcgctcaacgtagggagcgagaggcgtctgcgcgaggcgttgaccactgtcgaccagttcgtcatggacgtcatctccaagaccgtggacaagcgcaacgcgccaatcagcgacgccgaagacaaggtgcacactcgtgggcgcgacattgtgtcgctcatcctggccaacgagaccgtggacggcacgcctgtggaccccatcctggtgcgcaatgtggtgctcatggcgctgatcgctgggcgtgacacggctgcagacgcgctggcgtggctgttccacctgctcacgctcaacccgcgggtcgaggagaagctgcgcgcctatctgctggccagtctgcccaagctgggctcggacttcgactatgtcccggacatgcaggaggtgcagagcctgccgtacttggaggccacgattaacgaggcgctgcggctgtactcgcccgtggggctggctcagaagctctgtgtgcgcgacaccgtcttccccgatgggacgttcgtacccaaggggtcgaatatcgcgctggtgtatcacgccatggctcgcatgccaggggtatggggccccgacgctgcggcgttcaaccctgagcgctttattgaccctcaaacgggcgagctcatcaaagtgtcgtccggcaagttcagcgccttcaacacgggtccgcgcgtgtgcgtggggcgcaagttggccatgatggagatgaagatggtcgtcgcgtgtgtggtgagccgcttccgcttcgacgaggtgcctggacaagatgtggcgtgcggggggcggcctgactatcggcatgaagaatccgctcatgatgcgcgtgcagcagcttgctccaaaggaagatggagatgaagttgtagtgggggtggctgcctgagctcctcgatacaaaggatacgacaccgttagtaggaatggatatgtaggccttgttacacttggtgaatataaagtaaggcctggttaagtctcaccttggtgtgttctactcgacgatcaacctctgcgttgtgcagccatcagcattggtatcggcacctcacatgcagagccactggtgtacgtaaatttctctcatagagctcgctagtccgtgaagcaggtccgcatccagctttcaccttcttcttagcttgctcgtcaataactcgtctccatagtacacgtcttggaatgactttagcgtctgagcagtatagcaccacgagacaaggagctctgagccgatgaatgcattcgtcaccaggtccaagcgccgagtttctccagctaccagcataccgctgcgatctttatgagcgcgcgcagtagcctccagtgcatcaactcaggatgcagaccgtaatgcacgcagctaaatcgtcctgtcgcctgcattgtttcgagttcacgaactgacaggagcgcaagcttcaacgcttccttgctcctcaacttgggctaccatcagctcccctcggccttcgactcaagtcaacttctacagaaagcgtcttgcagtggccgcgtcagctgtagggggaatcagttgagactgaatcaccacagcagttctctccacaagacacacctcgcagaccctgtcttgaattacagtactaggtccagctcaagtcatgcatgaaactccattgcttgctttagcactccagctgacggcgcagtcgctgacgatcttgaaatccttgctactgtaacccctctctcgccagcacgagcgccttccagaggtagactataggcttcgcagcaggaagatactgatcacgacatagcggtttgtccactgggtctcctttgcagtacaagatgcaccacaaccctgaggcaggctgatgtcggcttgtgtacaacacacagcgacctgaagacacaaacttcatcgccagcggtcagttgcctccacgtgccgacagaaaccagcgagttaatccagctcagatcgagtttacgtgactgccaacccagcgagaagcaaagcgtacagcttacactcagtctgacagcgcaaatgatgaatctcgtcgatgtaagtttctcgcgagagcgtgggccgcagccggagggcagcgtgtgtggcgttccagcggaggctgacggtcagcttgctgagcggcatgacgccggcaacgagcacaagggagccaacccggtctctgtcaatcattccaaaaagggcgccaagcgcccgccagctcaactgaatagctcgtaaaacacgacgcacttatgtgactcagtgaccccgacgagtacgcgaacgctgcatccaaagcaaagatacagcacgcgctcctgcttgacagtgctcaccaggcacggagtgcggcgaacaagtgcacttgcgaggcggccgtgcctccttcttagacggtagactcgtattgccatcagagaaagcgaatcgacaatatcaagaggggatctcgagagcatcgtggataactcgtccatgaaccgggggggcgatttttcatcatcatggcttcgtttgatcgacgggaacaaagtaatagagacgacggcaccctcatcagctcttggttctcatctcaagttgactcggtatctgctgtccagagcccacacagtttccggctcaaccaccacctcgcacgtcatcagaatcgtactgcggaagacgctgggcttaacaacatcgagccagcggcgaaggctcgtgattgctgcccttcatagttgccgaccatgccgttatccagcaccgcgttctcggatccttgcacacctccaacgactacctccagtcctcaaaagccggcgctggggcgtattctcctccatcctggccaagcccttctctgaggccgcaacctgcagccaacgcgttgtcaacatccggtctatctcttgacgcagtgtatggtgtgatccaacgagcgccctcgcttccagcaggcttgatccaagctgcaggcccccagctctcacttaatcatcagcaccaagaactgctgaaacgtgtttaggatgaggcgtgtgcagcctgtagttttcgcagcagcggcgtctgaactgctgaaacaataaaacacactgagttggtaggcttccatagatctcacttgctatcagttggtctgccgctgagggacgtaagtcctcctcatacatcgcagtgttcgctcagcgtcgacgcctttagcttcttggtgcaagacacgagtcggcagcttaatcattgaccggtatgtaagcactcaggcacaatacgaggcgccagcgcttgatgccaccattctgcttctaacccaacactcaggtgatcgatcgccaacgaccggaaatccgacgatgcagtggcgcctttcgaaggctgtgctagccagcttggatgagcagtcaggcatgctagtcaacaacttgtacaggtcttgaattaggttgaaagtggcaacaagacagcgtcagtaacaagtagctgtgtttccatcacgcgaccaagtccttccagccccaggcagttggatgacgagcctcatggcgggcgaagataccagtagagtggtgggcaaccctcagcatttttaaccggagcagctcgtaaaaagtaagccacgcagaaaacagcagcagagaaatccacaacccaaaagactcagagtggagaggctcactctgaataacatcgcacgataattcgtacaggaactgaagcggctgtagattttcaacttcatcgcttgaacacagtgcaccgacgaggaacagggcgccagcgtcaacatcatcatcttcttcttcagttcttgatcgtcatctcaacttgactggaatatctgttctcccgttcttgtctccactgtcttccacttccatcaacagtaggcgcccgctagggagtacagcatcaaatctcacggcaggtggcgcccgacgcagcagtcgactccaccactcagacaggtgtcttccagtgccaagagtatcgacaatctgagtcctctccacttccagcggcaattatctgcctctatgcggcccgcggtctctcctcgagggccaacccactgcagagtccgaccctcagagcccaacgacggccttccacgtgctcaggacagcctcagaccgctcctgcagcagccaccggcgcgtcagcacttgatcctctgtcgagcagtggagcggcagccggatctggctgcatcggcagcgaacacggcagcttcggagtcctcacttgagcttcattttctctccacaacagcgtctgaactggggtacaaacagcacacacaggtagcgctacattagatctcgctcgctagcagtcgctggagacctggagcgctccgcttacctcgctggctccggtcgcgcggcgacagctcttgggcgggcgccttttcgctgcttgcggttgtgtccatttttgcaaaatgagccttttcaaattgggtcacatttttttgggttcatttggtggaaatgggtacaatatgcaacactttcgacgacgttacttattatagctcgactgatgcgagtcggccaaggacgaggacgtcgacgaggtggcgactagcgactgcactttactgatgccgtatcctctggccatcttccttgcgacttcagtcgcgtccagcgtcgacgcttcatgggcgcagaagacgcaaaaggtgcgcttgggctggcgcaattttccgtcgtgggcgatcctcgtcactcgcttgcgcactttgcaggaccggcacactgcgtcgaagcagattctgcacgttccgctgccgatgctgcccaagcttcctctcgtcactcggttggagcacgtcacacagacgttatgatctgtcctggaaactgggctcggacgcttctgctgcatgagccacgccaacttggtcatctggccgcacggctcgtagttgatggccgagagcagcccttcagcggcaatgggaggcatgaggaagcgcggcagctctccaccaggctccagaatgctgaacgagtggttgtcgatcacgttctcgctcaactggcggaacatacagcagatggacatgttgccgcgcacgacgttgggtagcgcccgggtctgggggaagtcgatcgagtgcatgaggtggtagccgatgcgttccccagtagcaaagtgcagaacgccggtggcttccacgtagacggagtcgcggttcttaacgaggttcgtggtctcgagcggcaggtcgcgctgcatccacttgacgacgaccgagagaaaagggtcctcctcggttggttcgaggatcggggcgaggatggccgcgtcgctcacgtcgtggacgtacgaggccttcaggcgcatggagtcgagtgtcgggttcatcacgcccagcatgaggtcgtccatttggccagggaacgtcccgacgctcagcatcacggtagttttgtcagccggggtggagcggagcgcttggcggtcatctcgacgcacgtggacgtggatatcgttgcgagacttgacgtgcttccattgcttcgggtcgacctggcgcttgtcgtgcaccacaaagcgctggtactggacgagattctgctgcacgagcgtgttggtcagatccagcagcagcgcctggtcttcgtgtgagagcacgaggtctgggtacgggtttgactggaagcgcgccttccccatagcagtggtgctctgctgcttccgatggtaaaagagttgtggtgctgcgagagatttgagtgggcgggggcagcccctgaaggcggtccaaccgcgcagcgatccaaccttccaggcatcgccgatcacgtgcgcacgaagtcaaggtggtcatctcgatgggagccaccgttgggtgtgcttggtatcaccacttcaaagtcggacagttcaaggacgcccctgaccttcagcgtttcctaggatatcgtgagatggatgacgaacccgcgcctgctgccaaacggagcaacgatctaccagcgcgaggtactgaacaagactgcggcgcggaaagggcctggtgttggcggtcgtcagtgcctcgcgcaagtgcgcacttgctcgctctccacgtgcgtgcaccagcgtttcgtgttggcgaacgatgaaacttcaacgggcgacctatcaagccgtagctcagctgctgtgtcaacagacagacactcgtgcaggtacagctccgaagacaatacgccctacctgatcgacttctttgaaggcgtcggcatcggtgatgggattattttcgcatcgaaagccttatactttttcggaacggcatgctaggaaacatgaagttgtacagattaatcgcaaaaagatcggagaccaagctccatctggcaaccacaaacacgcgatatcgctgggtgatgacaactcttcgacccgaatggttcgggaatcccaaggtatccttgaagcattcactgtcggcgtgataaggctcccgccactcagcaccatcgtcagtggggggggtcgacatgtaatttatctagcgtcactcctagcgtcgcaatgtgtctgctacagtacctactcgcagagcgacgactcggacgtatccgagtgcgaggcggtcgagaacgccttgtacgcctcgtagcccacggcttgatccctgacacggtatgggcgacagtaccttgccctgaacgatggggcagtacggacattagaactcataaacgaccgtcccgtctacgtgatgcgatgctccgcgaccaagacaaactcttcactacatgtacaagtacgaacacaagaatatcggcgatattcggcgatacagtacagtattatatcgccgacccccctcaacgaccgcgctctgcttgaaaactgagccaacggtacaagacgaggcgctactttctcattaatttagtaattcagtacattgacacttctgtcaagccctttgcaagtttcgcaacctcgcagtttctattggtccgacctttccagatttgccggggcagactgtactcagataggcatcacagggacatgatcgatttacaaatcgatcgagctaaatcagggttctaatcgatcgattaatgagcaaaatgggcaaattaagcggttttcacaatacatgtaaacaggtggcacggacaacagtgatcgcgtgaaagctagccacatacgcttatcaagtacataatgtgcctatcacgaatttcctctcccagcaccagcttgttgtccctgatggcaccagataatagctcacaaatgacaaatcgtgcgtcgactccccctcgactggctctcacggtgaaccaattcgtaccaacaacttgcctctccgtgtaatactcgtataacgcacaacacaataccgacccctcgcatttatcactcagcaattcacttcctacaagctccttctcgcccccgccgactgatgccatccccgaataagcgtcggcgtgtaccacccaggtgcagcgtccccgattgcaccaagcaggcgcagacgcatcggctgtgcaaggcgcatggaggtggaaggcactgccgtgctccggattgtcagaagctggttcagagtcgagggttctgtgtcgcccacggcggcggtaaacgttgtgaggtcaatcagtgcggcaaacttgcacagtacaagggcttgtgtctcagccatggaggagggcgacgctgccgcttcgcagactgcagcaagttcgtccaagtgcgcgggtgctgcaaggtccactcgaagctcctagaggcggcgatcacgtccacattatctccgtcgaaagagagcgatccatccacgaagcttacttcaggatcagagaagcatccgctcacccgaaacggccaagcattggccagctactaccaggacggacgatgcgatcgtaagtatgccctcatttcaggtgtgtggattcgactacgatttctacacttccggcttggagtcacaaacgggattgggtcaagcactggcaatatgtgtatagcttgctagttttctggtcttcacggcatgtccggtgtttcagtcttcctcgtgaatacccccgatgtcttgcctgactgcccgcaaacatgaagaacgctgtgtgttagatttcttaattatgggtgcgtgtttctcaatactcatactaggcagtgactaagacacgcatatccaggccgttccacggcgtagcctacgtaatctggtgatgtaagaggagaagaatttcgcgaacaagtcagccttcgacaactaaaatgagcttcaagacgaatagttacaatatggcttactccacaaacatgttgaccagattcactactaacaaacagcaaacgctagcgttaaccctttcgcttaactatacagttattgtctgtgcgagcacatcggctgcataattgctttgaagtttccataaccgaaggcctcgcaaagagctgagttcgtatcgaactaggaaatgcatgtcgagatgttactgtatctcttatccccgctttttcttctgctgctactgctgcagccaatctaacgtcctcttttggcaatacaattggcggcaagctgggcgatacaacttgaccggagcgtgctgtagtgtcattgcttccgtaaaatccccctgccagggaaaagaagcctctggaaccccacacagcagcgctaccatctttgcccagcagacaagggcgaacctttgttgcagacgtcgtgactgtaactcgccctcaaaaagagaccaagcacagtcgaacggcaacctttggaagaagacaacaccaccacacacacgaagcccctgcgaagcttctctctgcacacacagcacgtttcacagcttgcatcagccaccagccattcctttgtgcttcccggtgcttggaagtacttggcgggagcgagccgaaaggaaagcgcacacccgagccacagccaaccgacgtagagctaagcaggaaacgagataggaacactgtgcatagtgtactccctaacgctgacatgttagttgctatacatgttagctaactgttagttagtgtctagtattttgagctaacatgttagtagcgttagagcaaaagtatggagaagagtatatgtttgcaccggaggcagccgagaagggcgatgtatcaaactgaacacaatacaccctaaaaactaagaatttaccatccaatctataatactttgaagaatctgctaacatagggaaacatttgctgggtggagctcacatgggggctggcacaccacttatcagcgcagacgatgaccgattttaagagtgaagacgacttaggtgcctcctacctatgtcaaagtccgcggtgcaatatagacacccagaccagctagtaaatacgctttcgtacagattactaagtaatctcctcatgtacccattttataatgggcctaccttggctcactactacggcttacacgtatgcgcacgtgtatgaggaagcgtaggtttcttttacttgagttaagtatactcgagatccacgagtatactttaaacaagataaagactccaagtagcgggttttggtaaaagatgagaactgctatttttgttttatgtttctgacttcctctaaatgtaatattctaaactaggaatctgccaacggctggttggcaggattctgctaacatgcaagtcactcattggctaaaagatgctgctttcagccaataggaatcctaaatgtgtattcgtaaatgtatgtagccattggtgtaccttacaccaaggtcgaggaagtgttcaaacctctaacagacatcgcatctgttagagtaacaagtgactgtagccacttgtgcgtgtaaccccgttacgccatccccccgtcaaggttagacgtgccggtcccggcacgtcaaccaccattgactgcttggtcaatgcgtgatgttgaagagagcgcgctcgtaatggaacgagcgcgtcgaagttgaagaccgctggcgcagcagcggagaacctctctgctgccgagtagcatgcgcggcaacgtgcgaagcgcgtcgctgccacggaggcaggtaccaatatctgccctcgaagcgccttcgggtgctgctgttaacagcagcgctcgtattactttccagcgtgtagcgcatggtgggcttcgtacgccctcaccatgtccgggacgtcttcgagcaagacgttccgtggctcccatgtatcttggttgggaggtaatcctcgccaaccgatacgaaaacgaatcggttgcctgttcgttctcgggatactgtgaccaacaatccactcaactatccatcgcgttgagccgtgtgcgtcacgaattggcggcggtggtggtggaaacacgcctcgtgtgtggtcaacttggtgttggccctgatctcgcgtctccccacgaccgagttccggtcgtggagtagttccagtgctgggttcggcgctctgaagtatcctcaggttgcggcggcctcccaggccgcctcgatcgttccggccgagctggaccattagctcgacccgctgctccagcgcgacttcgcgctggtgaggatgacggcttccgccgagtcttctgcttcggttcagccgagctaggtagctcgtactgcaggtatggcttcagccgtccgacgtagaacgtcggatggaggcgcatactagacggtgtgtccagtgtgtaggcgttgccgtgccgtgccagcacagtgaacggcccgatgaagcgcggagcgagcttgctcgccccgaagtcggaaactgcatgtttaggcaggttttgagttgctaacaaaaccaatgaacccttcttgaattcatttgtgttgcccctgccaacgttgtctgcgttcaacttctgtcgatcaacagacgctgcaatagcgtcttggacaaaccgaatgacggcttgtctgcgctgcacgaagttgattgcgtccgcgctgaattcgttaagctcgtttctagcagtgggcccggtctctgcgttcgtcttcgcggtgtctgtgccctgcacagacccgttcttcttcttctttttgctcttgtcggcgtctgtgccctgcacagacgcgtgcttcttcttcttcttgcgcgtagtcgcggctgacactgtgaaagtgtcagcggcattctgcgactgttgcgttgcagtcgtagctcctcccccacttaaggaaggagccaccatcccgagtagactcgggaggcgtgggtgcctgatggcattcacgtagaacggtgtatgcccggtcgaggcatgcaccgagttgttgatggcgaactccgccatcggcaggcactcgctccagtgttggaacgagtgagcgtagctcttaagcacgtctacgagcacgcgattcacgcgctcggtctgcccgtccgtctgcggatggtccgcagtcgacatcgaaaattgactcccaagaagtgtaaacacttcttggcaaaggtgtgcagtgaagcgcgggtcccgatccgacacaatgtcgatcggcatgccatggtgtttgaacaccatgtcaacgaacagacgcgccgtctgcttcgcagtcacttcagcgggtaccgcagcaagatgtaccatcttgctgaagcggtcaacaaagaccacaacgcccgtgttcccctggctgtccgggggaagaccgaacacgaagtccaaagacatggactgccaacactctcgtggagttggtagtgactgcaagggagcctgcgcgaaaggcgcaggcttcacacgttgacaaacctcgcaagcacggacgtacttgcgcacccatctgtactggtgggcccagtagaagtctcgcgtgagaagaaggtatgtcttctcacggcccggatgccccgcagtcggtgcatcgtgatacttgtacatgatcctgagtcgcaggccatggtcattgggcacgacaacgcggaccgcgttgtcgtcgactgcactatagagtaataacccgtcgtgcacccgataacggtgtgcacgagcacgaagatgcttcggcaacttctgacgagctttgtcagaaggcgctgagccgtagaccagcaagagcttcgcgtccgcgtcgtgcgcgtacgcgaccttcacgtcgttcaacagtgacgacgttggggtgctcgatcgcatggcgtcaatggcattgacgtcggcatcagtcgtggcgtagtcaggtcgacgcgagagcgcgtcggccaccacattgagtcttccgggtgtgtactcaacccggaagttatactctgcgaagaatgagagccatctcgccatccgttgcgagatgtgctgcgacttcacagccgtccgcagcgacgcgtggtccgtatagaccacgaacggtttgcttccgagtagatacactcggaacttcgcaagtgcgtacttcatggcaaggagctccttgtcatgaaccgggtagttgcgctcaggtggcttcagctgacgcgattggtagtagacgacacggtcacggccctcgtgatcgtgctgcatcaacgcacatccgattgagaagtcggatgcgtcgcacacaacgtggaacgggcgatcttggtcggccaccgccaagatcggtgcttccgtcaagccccgcttgactgcatcaaaggcctgctgacactcagcagtccaaacccactcggcgtccttcttcaggagctgtgacagcgggcgtatcatgcccgcgtagtccttcacgtacttgcacaagtacgtggccaagccaaggagctgccttcgccataggtcttcctcctattatcaacgtattttatcactccaatagaaattctattatcctctatttatactccagtttatcagttttgaaaatttttataaagttgagctcagtcggaagctccccaggaatctcttccggaagtacgcccgcgtactcccgtaagatctcgagtagggactcgttttcaacaagtcccagctctgctcttcaaagcgctccttcttcgtcttcgcactgagagtgtcctcgctctcagtggtggtctccatgaagaactgcctcagttcttcattctcgctcttcgttctatcggcgtccgagagaatgcatatttgctcgatgcgtccatcgcgcaagtcacgcgcgaagcgcttccagctcatgactggaagcgaagtcaactccgacgcttgcgtcggagggttagcgagagtcatctccctgtaccggaacccggcacaggtacgcgtcaagacgttcaacgtctcgacgtccggcttctctgcctccgtctgcccgggagacatttcttgtagcgtctcggccccaggacgagacttgcgcagcgaccttcgcatgcgccgtcttcttgtcctgcggagcccggctccgcatgactcttgacctcgtccaggcccagccgtggacgggtgttcttcttcagtaccgccggcgggttcattccgcgggcgagcgacttcaagcccggcttggtcgcccggcgcttcgtcgtgcagcccggctgcacgacagcatgcaagtttttccggtgcgggacgtttgcaaccgtccgcaccgcttgcagcgtcgactcccggagtcgacacgccatctttacctcgacgcctgttattggcagagccctttattactaggggtgcgtcgactcggggagtcaacgcgaaattccttttcgcagcgccggttcccggaaccgtcgcgactttaatacctcgacgccaaccattggcggagacccccattacgtagggtgcgtcggctccccgagccgacgaatcaaattcgtccaagctatcgaatcccggagtcgatgcgacttcaatacctcgacgacaaccattggtggagacccccattacggagggtgcgtcggctccccgagccgacgaatcaaattcacccaatccatcgactcccggagtcgacagcgcttcgtcaccttggctcttattattggccaaaactgatccaatcagattcgcgtcagcctccacggctgaggcgtgtgactcgcctgcgtcatccctgccccttgaactcggagactcttcctgattcgggtgtcgatctccgagatcaacacattttctccttcagccgtcggcggcgacgccgacgcttactgctcttgcgcgcgtgctcgcgcgcgcccagggcgctccgggacagcggcattaggcgctgtctcgagtggggagtcgcacgcaccgacaggtgcgtgcgtagcggcaacagggtcatcgctcactgttccgctgtcgcgaccgaagcgcacgagagtgcgcttctcccaatcgatgaccggatcatgccgtgcaagccacggcatgcccaatacaatgtcaaacttatcgtccagatccaggacgataaaggtctcgacaaactcttgatcttcatacgtgaagcgcacgcgtaccatgcgcttctcggttttaacgatggcacccgttgccaatcgaacttccaacatacttcgaggtataattacctcctcgaagtcaagccttgataggcttcgcagtcgaacaaagttgttcgacgcgcccgaatcaaccaaagcacgaagagagttgctctctcttcgaagacacgtccaagatgacaaggttcggtttgtcatcatgcatttttgtttttgagaagggtcctcactggggtgctgcagtcctcagtgtcgcatgtccgagttggacacgcgtgactgcttcaccagtagggcgccccgcgcctactgggttccatcgttttttgtttgtccgcgacgatgcccggcatcgccgcgtcgaccaccatctcggtgcacgggtgccgtgcactctcgggcatagtgaccgatccttccgcaacggaagcatcgtgcattacttccttgttgctgttgataatcagcagccgttgcattcgagaggtccattggttccggacctcccgcaatcgcgaccggaggcggttgcagcctcggcgcattcgcatgcagtttagcctgcctcagactaaacccctcctgcattgcaagagtaattgcagcttcgagagtactcgggtactcacggaagagataggtcttcacaggcccatctctcagtcccttcacgaacgtgacgaccttgatcgcctcgtcgatcggattggtcacgatgttcgagaccaagtaccgtgctctctgagcgtaagcatggacatcatgcttgccctgctgcaggtcgaggaactccgccctcgaccggaactcattttgcgggggctcaaacgcttgtctgagctcctccttgaaaccctcgtacgtgctgaagcacgtaggatcagagagtcggcgtccatacgcccaacttcttgcacgtccgccaaggcatgacatggcgaacgcgaccttggacaacgggttgacgatacgtcgagccgcaatggcagtgtcgagttcgataagccaccggaggagaggctcgccctctcttccaacgtaattgctcacgctgagcttcagcgattgcgcgcgcggtgtcgtccccgacgacaccgtggtagacgaagcagcatctcgctgctccctcatgatgaatcccagagcaacaccatgttgctctgtcggcgttagcgtacgcagcatcgtagctacagccgcctcaccaatgactgttgacagtcgttggagagcttcccactctgggtccgacaggtggggacagtcagcgcgtgcaacgtgagttgcaggcgtagtggagctttccatggacacctccgtatccatgggaaggttctcagctccgcgttcgtgcggtgacgtacgaactcaggtagtcggtcgttggacggactacaaagtgttaccaggtgtaatgggcctaccttggctcactactacggcttacacgtatgcgcacgtgtatgaggaagcgtaggtttcttttacttgagttaagtatactcgagatccacgagtatactttaaacaagataaagactccaagtagcgggttttggtaaaagatgagaactgctatttttgttttatgtttctgacttcctctaaatgtaatattctaaactaggaatctgccaacggctggttggcaggattctgctaacatgcaagtcactcattggctaaaagatgctgctttcagccaataggaatcctaaatgtgtattcgtaaatgtatgtagccattggtgtaccttacaccaaggtcgaggaagtgttcaaacctctaacagacatcgcatctgttagagtaacaagtgactgtagccacttgtgcgtgtaaccccgttacacatttcctccactatacagtgtagctaacatgtgtagttttcaactaactgttagttagtatccagcagaatcagcgaacatgttagtggagtacactaactgtgtatcaatacgctaacgccctcttcacgcagcagagcgatgtaacaagaggtactggaacaagtgtacactgaagtataaacagcgtcagcagcagagcggacaatacacacatgcagcgagccacacaaacaccaccgaaacctcgtcatggaagatttttaaatgggtcttatgcagaacaggtcttggatttgattagagcgtgctttttcgttgaacttgtgattggatcacatttgccatgctttgacgacataagtaggaaaagtcccagtctcactttgaaacctcagccgagcgcctaccacgacccaagcttcctaacctctgtctgcgcctcggtgatgccagagccacatcgccacggaccgaggcgttgcagcaccgcgggtcgctgcccctgcaacaccgcaacggcatgcgtcggacggaggaagatgagcaagatcctcgccttgaagagctccagggtaagcgcaagcaccaccagcagagcagcaaggaggccatgggagaggccgagaagatgcagcagcaccatcgtagtgggcagcaggtgggcaagatgcgtcaggagagcacaagcagtagtcggccaggaagtggcttatggaatcgatgggccatactgcgctgtgcaagctatactatttggtgggcgaggacgcgaaaagtgatgtggtgcagctgaagatgccgtccgtcgcggtaagaacaggtgacgcacagacctgtgtgtgcactcgtgcaaacggaggcgctccacatgcctcgtgagtgcggagcgcgtcaagtccacgcaggtatccggatacatcgttgctgcccctgttgtccaagtcggcgtagctgaccgctgcgccgtgcgccactcctgccacgtgctcaggctgccgccgccgttgggctccgagtcgagcggaaacgcgcgcacctttggctgacaccgtgagcgagcttggctcccgctggcagatgtctacagaggctgcatcggacgtcacgagacgtgccagtcctgtcgccgccgccgctgctgctgctgctactccgtctgctactccgtctgctggtaaggttggtcgcagtgcaacatcttcactttggagagtttgttgccgtgctgcggctgtggcacctcgctacgagctgaaacgctatatatttctcctagtcaagcaggagtgaaacatgtcgatcacatgccgtagctaggctacataattctaaagtacatgtacctgttacttgttggtaaactaattttacaagataggtgctaattgccaacagtagagtgtcgatgctgagagtgtgaacggaaaccaaaccaggtgtgcactgctttgactaaaaaaaaactccagtcgcgaatgggatacaatgcacgcactgcagcaactgcattggactttgagcaccactagaaacatgaacagcgtgtgctattgcagataatgaatcttgctgtcaagagaagtaggaaagggaggcatgttcgactgctgcggcgactcgttctacctatccgatacagtgcagtaggtgatagtccatgtaagcagtgaatacaatgcttttgaacacgatctactgccaaaatacctattgagccaaggtaaccggccaaaatgcacaccctttcacgtagatacagcaccacgaactgttgctagagtaggaagccgaacggagcacgcgctaaggaacccagtcatgccatgatccaaagctgcaggtcttttgattcggtctcacaatcagcatgttcaaatcctggacctgatctgcataagaaccaaaatttcgtcatttcttccctccttttgagtctagaactctttgtccattccgagtgtgaggagaagaaagaggtcagcaaacaacgtgtaacacactaagacgagcattccccctgtgaaatgtaaccatctccctccacaaatagagccctccacttccttgtctagggttacaggaagcccattagacgaagttggtcgcaatacctacaaaactcaagatgtgtgtataaatctcctctccgcttcctgtcaaccttgtaacaacttagtaaactttgttccagacgtgcctccaccgcccgtcgccttgctgatcgatctccctcggcggacacaaggccagaagacaacacccttgcacgcacactgtcctcgctacagtttattgccaggtgagctcgtgattggttcaaaagatggaccacagtttagtctaacgtcacaatccagccgctggaccgtacttcatctctgtccatacaaacttcaagttatccagacactgtcgttatccacttgcatatcaaaacccaatcagactgatagcggagcccaatggcgtcgccctcgccgactacgacgacgcgcgcgcgctccatccagacgctggacggctacgtgagtcgcgggcgcgcgccgccgagctccgtgccgcgcgaccacgcgacgctgcaggacttcgcggcgttcctggagctgcgcctcaagtcgcagaacgtgtccttactgcggcgcgtcttcgccgacttcctcaacgagcaggagcacacgctcgtgcccctgatgcggcagggcgtgagcatcattacggtgttccccgtgctgcggacgaacccccagcggcggcggcaggcccagcggctgctggccaagcccaagagccacctcgacccgcgcggctgcgtcttcctctacctgcagtaccgcgcggccacgaggaacatggcgctgctcaagcacatgttcctcgagttcgtgggccacaaggaggcgtcgctgctgcggttcgtggagaggggcaacgaggtcatcagcgtcatccccttcgagctgccgcgcgtgatcctcccagctccagctcctgctgcacctgcacctgcagaggcggctccagagcagcagctagtagagtcccctcgggcggtggaggcggcagtggagcagccagttgaagcggagaggaagaggcggaagacgcgctcgaaggagcggaagaatgtcaggccagcggagccgaaagaattggcgacggcgtctgcagtgtcgtcggagaagcagcgtgcagaagtgagctccaatccgggtgcaaaccaggggaaacgagagagacgtaagaaggtcgagacgcaggacgatgctcctgctactcctgctgctgctactgctcctgttgctacactgcagccagacgtggctgtggctgcggagcctgagcgtgatcaaaacaaacggcgaagcagacgccttagtgctgctgctgttgcctctgccgtcgcctccaccaccactgagtctgctgccagcgaacaagaccatcaagagaatactggggcaacagcgagttctggatcgggggatgcagacgcgagccaggtgaagcgaggaaggcgcaagaaggttggaaagaaagacaattgtgttgctgctacagcagcttcagttcctgtcgctatacagcagcaagttgtgacggaggctgtcgatcctgagcgtgtcgttaaacgacgaagcagacgtattagtgatgctgccgccgcagccaacactgagcctgctgtcaacgaaggcaatcaagaaagcagtgtgcctgatgctcccagtgctgctgttgagtcggccccagcgcgtggcgagaagccgaaatcgagcactgcatcacaagagaaggctgctgccacaccagtggaagctgtagcccctcaggctgccggtacacctccaactactgctacccccgtcgaagcgccgcaggaccctccgaaggccaagagaggacgaaagcgcaaagctgaagcagacaagcagaaagatggctcacacaccgctgtgaaatcacacaagagggggaaaccagtcatgagcgaagccatgtgccgcagccaagagcagttgacgcgcaagatggaggctttcgaggcgcagattccgtgggaggcggtctttggtaatttaccgctgccgttcgaggaggaaaaacacccggagttggccaagaagctccaccgattctggcacaaacactcgcgcgctgtgtgggagcgcaagttctgggccccgatgtctcgtaagatgaacgccttcgccttcaacaagcgcaacaaccgccagatttccgccaagaacgcgtttgaaaccatcattctggctgcgtacgagcagctcggagccgccttcttcgtcaggctggatatgcagcagccgcgccaccctggttggtggtaccgaagccccgtcgtagctctcttcgctctccaagaggtcaagggtgaggacgcggtctgggactacgtcaagaacgacgcgctcgagcgcttccccgactgcaagctgccgattccgatcaaggctacgaactacggcgcagtgcagaactgccacaagagcgcgagtgaatccatgtggatggctaaccacccgctgaccccaacgtggctgggcgaaattgctgcactcaaggcgaagcagcaagcgcatggaacttctggtgaagaggctggggtaagccaaccttcaaggggacctgatcgtgagccggagaatgtaatgactgtgatggacgcacttggcttcacttgagggagacgccgtgtgaattgtggatatgttgaatttttacatgtcatcttcagctcagtgagagcaaaaacaggggtttacaatgaacaggttggtaaatgtaagtaagcttgtttgtttattaaagatagatggctacacgcaccaacattggtttgtctagcctgcctaccggtagcaactttttgatgagcaactgaaatgtttcactcagggatctttatccatcagcactttatcatttggggccacaaacctgtcaaagagttggacttagcacagtaccgtaagaagtaccgtcgatagccgattgctgtccaggtgaccggtacagcgttgcagcacaggtgtcaaactgcaacgcaactcaagaagcggaacgcgtcgcaacgaagtctaagctaggcacgttttgcggtttcattacagaactgctgcagatacgcacatgtatcaaaccaattgactagtagtccattacgtacttactccaggacttcgtacgaccgcaaagaaatatcacgatccagtaacaccacattggatcgccatcgagtttgctcgtcagtatatggggtacatcgagcaagcatattgtaaattaccagtaattattaaaaataagctatggcaaaccagcaacgcatccgaaacgacttaagcgtgcccaaaattgtgcaacctccgaagaatggcttgaattaccggtgtggaacgtttgccacaggacagcacccagttgcttgcatactcatgccttcgctgccagcaaaaaataaactagcgctgcttgtgtgccgtcctaattgtttttcaagattaacaggcgctgccaaggtgtagacgcggtagttaatctaagttagaaattgtcgcggtttagaacgtgatgtaccccctcaactcaacccaacatatcgatgatgtgctcgtgcaggcactcgtctacggtaaaagttccgcggtagataacacttacgatcgttgtgtaattaacctaaatgcaccttgtacacacaagtgtagatcgagttaccagtgacaagcattgccaaagggtgtagcttcagccgtgttgtgctggtagtcagagcaaggcgccatcgattcaggaaataaaattaggaccggtctggcgttcgagtcatctatgattgcattaactactacgcgacaagttgcacgtaacattaccgtagtctaagcttgccaaaagcctttgcccactggcttgatcaactgtttcaacctttagccgtgcatgcagtttgcaaatatagacggtaagtaattccaattgatttgttgctgttcttgcattcattcggagcacttcaagtcgtcatgcagtataggaacggttttacagatacaaactgttggcctaataagcagacccggttggcagatatttacaggttccggcgtaaataattttgtgcaaggcatttcactatcggtgcccagacgtgctcagcagaaaatgttgtatagctaaaattcagtgctgcttaggtagagggcccttttcaggaagctgaaagcagcgaacgagaactcctggaatgacatttaattaggaacagcctacagcgacaccaggactttatagttctagttacgtgcttcttggaaataatagaggaccttttagagctctcccactaaagagttgatgcaagtgtcaaattccgctacgacatttattgtgctcaatagcttcctctcttcgatgcctttgcgtcacttattgctcgttttagctataaactaaacttattttaatactgcaagcagaaatggatccgaggaatgttttgttacatgaaggagcttcataaagctcatacgcctggacagcaatcggctatcgacggtacttcttacggtactgcgctaagtccaactctttgacaggtttgtagccccaaatgataaagtgctgatggatttgtggccccttttgataaagatccttcactcactgaagtagtgctcgattacccagtcctgaatatccgagtcgtggaccgccatgctacccgcggctcgagtgcagccttcacctgtgactctgtgaagtagcagcacagcttcaaagtggccgcccaatgctgcgttgtccattgctgcagtcgtacaaccttcaccccgattctcatgcagccaacgaatcgtcttcacatcaccacttcgagctgcgttatccattgctgcagtagtacagccttcgctccggtttttgtgtagccatttcacaacgtccaatgctccagcggcagccgcgccgtccattgcagcactggtgcagccttcagctcgattatgctgtagccacttgacgacttcgagatgaccgccgcttgccgctccatccatagcaaccgccttcttgtcgattttaatgaagccactgtactacattcaggtgtcctccagtagcggctccgtccatcgctttcatgctgcaactttcacatcgattatgatgtaaccattccaccaattcaagatgcccattgcttgcagcgtcatccattacatcctttgtgcagccttcgttgcggtgctcgtgcaaatattgcaccacctccaaatgtctgtttcgcgccgcagaatccatggcgtccgtcgtgcagccctcagttcggttctcatgaagccaccaaacgatttcgaggtggccattagctgcggctccgtccatcgcgtctgtcgtgcactgaggtctgatcggcttctccttcttcactccatccgggtatatggctgcatagtagcagggagcttttagaagcttttgtttctccttttcccgcttttgctgccgccagtggagcgcgagtgcaaccgcttccttgcccatttcatgtgtatactgaacgattgctagatggtccgttagccgccgcaatgtcgataggtgtttggagtttctcggctgtgtaatcgtagattccgaagaggttgacccttggattgaccccgagctccgtgtaaagccactccacaatatccaaacgtccatttcttgcggcaacgagcatcgtttcttcagacagataattgctgtagtgctctcgttcaaataccccccaaagtgtttcgagcgtcctgtccagtctctccttttctctccacctgccagaggtttgtccacacaggcgaaaagatacttggctacctcaagatggcgctacactggcctctgcaccgacattggtgatatgaggacggcgcgtcatgttaacagcggtatgagtgctctcaccaccgctgtggtagccatcttcgctctcaagatgggtatcattgtgataatcctcaacttctccatcgtattcgatcaaccagcgcacaacttccatctgacccttctccactgcagccacgagcactcctcggtcaaagtgcatttcttcctcctccagatcttgctcgtacagcctcttcacctcgaggtgcccatttgcagcagcttccctaatatcaacctcaatctctaggccgatcttgtcgtccagccactcgaaaaactccacattacacatcactgccgcagcctcgagactttccttctcgtccctgtactcaacgttcacgtatttgtagagccaaagagccatcatctggcaacccgcacgaatggcgttcgctgcgtccttgcctcaccacatcacgcgtctcgcgaggcccttctcttcctcagttttctcatcgtcgctctctaatagctcgtcgttgtcattatctaggaagtagtccaggatctccatgtcccccactgccgcggcctcctccactacttttcgagttacgccaaacccacctcgaaaatgatggaacagccatttcgtcatggctacatcactgcgcctctcagcttcccggagcgacaggttgaattgatgtcgttgatagaactcttccgactgcatcaggccccgaatggaccaggacgagtcttggtcgaacttggctctccagaatgcgatccagcagcgtcagcgacccgaacttgcagggtttggccagtgggagctccaccgacgcgtccgcaaacatggatacaatccgctccacatggtgaagggcttcaacctcgggctttgagcgaaagatcagcgtcacaaccagcagagatggcaccattgcaaccgtgtgtcccttgatcgtgagtgcagccatttgagactgcctcgaacaaaatgatactaagccaccatttagagttatcgagataatagcgcttgaaaattggctgctatttttcgtatctaagtgaagtttcgagaaagggcccgatttgtgatttgaaaacctgaactgtcactaaagcgaacgctccctcaacacctcactctcaaagaagatctacaccaccgccgacatggaagcccaccgctcgacctccgagctgccatcgcagacctccagcggccccgagtcgtcgcccgccggcacacaggcttccggcgctctcgcgtcacagtccgttggtgcctcggagccgcccgcgtcccctccctgtcaacacccccccctcctcccaagcagcatatgccgtacgcgcccgagcagcacgtttcggcaactcctgggcagcaccttgcgcgcacctccgatccgcagtaggaggagagtgcctccgagctgcacgaatcaccggcgtgcacgccttctcgaaccgatcggcagcgcaaccagaaaaatcgaccccgcgtgacctccccgcacgttgcggcacatgccgccagcgacgtctcgtctgagagcgaggagcctgatgaaagcaatgatgatgaaaattggagcacggccgagtcagctgaagaggatagagaggtgacgggggacatcgagggaatcgaagacgatgagcaagccgaggaggatataagtatcaatttgatcgaggttgatattcaccagaaggtgacaggccttatcagagctgataagtgtgagcgtcgctgccttcagggaaaggctcaagagctgcagtctctggttagttcaaaagtgtagcaatgtacgtcgtttagctcagctgatcaatcaatgtgatacttatgtccatgctaatccaaaatgatatcaattgacagcatgtgtcactaatatgaaacatcgcgcgaaagtgaagttttaagactatttcaatgcgaatttgaagaaacgaagggtatcattggattcgctgtacaattttacaccagggtagccaatacaaaaaaaaaaatcttaattttgctctgggacgggagataattttttcgcggggtcatatctttggctaatctaactgttagaagttgtggagggcctcaaaagatagctaagacgcccctctttccaacgaggtacctaaatcccaattcgtactttggttgattagtatctttttgttcgacgcggtctcattttatcctctaatcgttacttcagaaccgttacttcatcttcactcatcatggctgcatcgtcgccgccgtcgccaaggtatcgtccgtcgctgtcttctgcagtccacgacgcgctctattcatactggagactgcctgctcccacccgttcatcgctgcagtcgagtgtacccaagttccgagtggacgtcgatggagtcgtgactctggactggaattcgtggctcagtcgtgtcaaagcagatgtagccatcacgaatgagatcgaggcgacgtgggctctagctattgaggcagaacacttcactactactaatgaggtcgtagacttgggtcgagacagtcgatctcccagttggcgagcagttcgaggcttgacccattccacttcactgggaaaagtggccgagatgctgcgagacgagagcggcgagttcttcttggcgttcgtggtgggggtgacgatactggagaaggcactgtacgatcttcacgaccagagatcatcgccttctggacccgtgaagaagaagaagaacatgattctgagagacttgctgcactcgggcacgctggaggacgccctaccgcccggtttgttgcggctgctgaaggttctgttcctcccgtcgggtctgaacctgcggaacttggtgtggcacggcttcatggctcctgccgagttccccaagtgctttggctgcctcacgctgctgctcatcatggcactgccgaggtgttttgaccaccggacggaggaactgctgactgagattgagcatggggacacggagctctttcgtatcgacagttttaacgctagatttgttacgagagaggagacagtgatcggggaggaggaagatggcgagttgaaccaggatcccatcgctgtgcttcgtcatgaaacgccagcgacgaggagtgaagtcatccggaggtggtccactgctgctttcgttcctatggggaggtcgaatctgctacgacgtgcgattgaggctttggtggatcgaggagacgagttgtggttcctgttcgctattttccctgtattggagcacgcgctgcgaattgaatttctccgtctgaatcaggagcgcgctggattgtccagtgcctacggtttggcacagatcgacgcgtactactccactctggacggcttcggccagaaggacaagcaccaagtgctgctccaccctgtggttctagtcgatggtggtgacagcgatgagcgtgttggggctgaagcagatgacagtccaaacgactcagtgacgaacgctttgtacgaggaattaccctttgcgtctctggctgtgctgctggatctcttcatgatgtcgagtgggcccaatcttcgtgccaagctttgtcatggcgaggctaatctggcaggtttcctctcaaactggagccaaggtgctccttcagctgtcacagaggtctcatcagcgactcgactactgtttgaagtgctaattctcctctgcgaacggagccgaggtccacacgaagacgacgatacgctcccgagtgccgtaagtcgctgtctacagtcatttggctcagctacaacatcttcctttcacccgttctaccgcttacaccgcgctcttagcgcggtttacaaggttgcgctggacttcgcagcttttcgagagccttatacagcgtatcgtctggaagaattacacgcggctggtgaagacgaatcaaaacggcaggcaagcctcactcgagttgaatttgattcgatccaagtcagtggtggtgccacattcgcgttgatggagaaaacagatcgagtggcagagtttcaagcagcgttggcagtaaaggaagacgctggaactcaatcacttgccacgaagaagaaaaataagagcttcgcgtccttgatcgggcagctcaaggaccagttggagataattgcgactcgtatccagaaggacttcgaggtaaatcactgcacaaacaacggagttggtcgacgcagcgtcttcctcagcgttgatggcgtccgaagccccttgaatctcttggagcggtcaacggagcggagcctgttggctttgagtgatccagatgggctcagcgtggcttcgtgcatgatggaggtcatcgcgtgctgccagcgctccctccagacctttagagagcgaatcgagcagctccagcagctcgtgacgcaaggaaaagctcggacgaaccaccggcgctcgttgctcacgagtattttcttcctcccagtcttcgagcgcatgcagctagtgagtctaagcatcgtcgagcatcagttgctgcacctacacgacgttgccacagtcacaagcaccagcgcagattcagcggcgacgaaggcgcctgcactttgccctcgagccacgcagatcgagcagcttcagcgcaaactcctgcagtgcatcacctcgttcgaaggctgcacgggcagcactgaggcgtctcaaaagagtggcgaacaggcagtcgaacgagcgttgcagttcttgaactcaaaggcgatgaaagcagcgtttccttcagccttcgacatgagacgaagagcaaagacgatagatgaatgaacacccggtgtcaaagagggggatagctggatgatctgtgaatactcaatgttcacgatacacatgagcgggttttacgcttgtcgatgcagggttgcaagagctcaaggcactgggacccttcaaacaagaacaccctcaagttcttcttctaacatcgtacctaaactcaataagcactcattcttgctaactattgatcgcagctacatactcacttcagaacgtcgaaaggaaccacataagtttagatctgggcgatcgtcgagttgatacgcacaggcgaactgaacgtgtcgaaggagcgaatcgcagcttcatcgcggtcgatgcgtttgtcgtccagtttcttcttcttggtaacgtaggccacagcggccaggacgatgccgcccacaaccgccagcaccacgagagccacgatgaccgggctcgtgccgccagaagtcgcctcggtcttggtgttcgcctgcttcgtgtcgtccgatcccgccttttgtgccgtgctgtcagattcgccgttctcctcctggctggtaggggtcttttcgacgccggccgcagaagactggaggattgacacaccactcgaagactcgttcgcggcagtcacctttccagccgtgtagctgcctaagctgccggacttgagagtatcgaagctgttcacgtcgctctgctgctgggtctgagactgagacgcactgccgctagtaacaggtgcagccgtggtcgcagtcggcgttgctgtcgtaggtgtcggagcagcagtcgtcggtgtcggtgtcggtgttgtcggtgtcggtgccggtgccgtcgtggcaggagccgacgttgtctgactagtttgactggtagagctctgctgcgtcgtgctgccgccgaagttggacgtgccgtcagtgcacttgtcggccgtgagcgacagcgtctcggtgatggtctcccccgagatggacgtgagctcgatgtccaccgccgacatgtcgacgttcgagccgccgttgagcaggaagtagtagcacgagtccaccatggtcacgtcctggttggcgatcttcatgctcgccacgccgttggcaaagttggcgggctgcacggccagccacgagctgctgctgccgctcttggtgcagtactgcacgttgccgctcacggggcagtccacgaacttccacctgatgctgtaccgggacgggtcgctgcccgtgagctgcttgaacacggtcggggacaggtccaggtcgccttggctgcactcggggcacttgtccacgatgaagaccgtcacggtgctgctcgtgtcgctgcagcgcgagtcggcgcacgagacctcggcgcaccggccgcagttgagtgtcgagtcccattgctcgctgttgagcgccgcgtagtagtcgcccacgccggggtcgtacatgaaattgcagttgccggccgacacctggcccagcgtgtaggacgtgccttcaccggcgaagtacgtgtcgccgccggcaagggccatcgccggcagtgccaccgacaggagcgcaatttgccggaacatcacaatgaaatgatcgattccaagtgcctgctgaagcgcggtagctaatgcgctgcaacgggcacggaactagaaatgagcgccaccgaaccgactgactgccatagagtctcaactgtacgagtcaaagaggcccgaaaaggctggagcggtgcagatcgagccgatcgagcctgaaatcccgcaagaaatggtcccaccccgtacaaaggcatcgcaacttacacaattgaaagtggagcttcctcgttttgccgagaaattcttggctgcatcggtgcccttcaagaatgacaacgcgcagatgaaaagagtgggctagcgcttcaactctcgtaaaatacttgggacaacaatgcctctacggagtcgtacgcgtaaatgtagactcgggtggcaacggaaatatgcgaggaagggctcccaccccacggttggtgacgcaaattatggcaaagaatacaaataataataaacgcttgtcgccggaagctttgctttatacaaggtacggtaggtgaggcttcgtacgcgacccgatccgggcgccacgccaccatcgtgtgtattatagttacgactgcgatgggagcggttccgttgccactcgcccctttgaaaacagagaaaactaactcatggagcacgcatatacacactgccggtcgatcgaagccacacccgcttgtcttgcaaaaatgggggcaaactggaaaacctgggcttagatcttggcgatggtcgagttgatgcgcacgggcgagctgaacgtgccgaacggacgagccaggtcgtcgatgctcttctccttcatcttcctcttcttggcgctgacggcaacaaccgcgagggcgacgcagccaacagcagccagcaccacgagcgtcacgatgcccggactcgtgccggtagaggaagcaccggagtcctccgacttggtgttcgcctccatctgggtcttgtcaaccgcagcatcgttagactgcaggatggacacgcccttcttggacgactcgtccgcagcagccactctgccggccttgtagttgttggtgctgcccgtcttgaggtcgtcaaacgtctcggcctccgtgagcattctagccgccaccttggacgttccctccttgcactcgcccgcagtgagcgccaccttgtccttgacgaccttacccgaggccgacgtaagctcgacatccaccgccgacaagtcggcgttcgctcccttcacctggaagaagtaagcgccagtgtccgaaagggccgcgtccaggccggcaatcttcatgctcgccacgctttccgcgaagttggcgggctgcacggcgagtctcgagctgttagtgaggctgtcggcgcagtactgaatgttgccggtggcagggcagtccacgaacttccactttatgctgtactgggacgggtcgctgcccgtcagcttcttgaacgccgccggggacaggttcaagtcgccctccttgccctcgggggttgtgtcgacaatgtgaagcgtggcggtgctggtcttgtcagcgcatcgcgagtcggcgcacgagacctcgacacaacggccgcagctaagcgccgatccccactgggctccgttaagcgccgcgaagttttcgccgatgttggcgtcgtacatgaacttgcaggtgccgcccgagacctgtccgagcggggtcgcagcgccgttgccggtgtagtacgtgtcggcgccggcacggaccattgccggcaggaccgccgccaaaatcgaaacctgtcggaacaccattctccaggccgagtctgtactgtaccgaagttgagtgctggagcggagaaacctggaatgagcccacagactacgtagggctttcgacggcgcgacgaaagccagaaatgcagatcaagccgatcgagcatggccatcttgcacaagagcggaccaaaaccgctcgtacatatgtaatttgacctctgcacgttgcactggtcaacgactgtatgggtggcgctgaatttgctgtccgattgttttccggcacgcattactataccgtggcctatccccctcctaaacttctggcccacatgtgcggaggacgcacgtgtgtatacgctatggccgaaagcgcatgctggcggcggataactttgagcaacacgagactagttacagaagacaagtttttttcgtgctaagcaagcttgtgccattttcgaccgagaaagtatcgagcaattaattattcatgaacactttgcaattagcgtctcgagggggttagtattaatacgctgcggcagggagttggcgaggggcgacgagctgggctgcgagtttggctagggtttccatagtcgcgtactctttcgttgaaaagttatcgtgcggcttgaagtcggatgtgcacaacgacgccacgatggctccgtcgggcgctcgaatggggaacccggcgtaaaacttcacaccggcgtccttgatgattgtcatctgagcgaagcgcatgtcacgctgcgggtttttcaccaccagcggcttatcagcgtacaccgtgtgcgcgcacatattctcatcccgaggcgcgacgttcatctccggaggacgctgagggaaggtgcccaccgcgtgaaaagtatcctcgcccaccattgacacatatccgacggggcagttgagctgcctggctgccacttgagccaaaaggttgagagctgcacgatcgtacgtcgggtccaggacaccagagttgttgatgtactgcagccgcttgcactccatgtcttgctcaggcattggcggcagcgggtggttcgggtcgcgagttcggtcgccgtcgaactcgaacgcgtagtcgcgctccaaatcggccacctcacagtcctcgggcctcgtgcacttttcagccacacgcaagctccgcttcaggtggtgctcgatatccctgcgcaccttctcggcgaggtccttgggtggttcggtagtggtgcttgcgtctgcgcttcggtttagactgcagagagcccgatgcggtggggctcaccaatcggccgagctgttcaagagcgtgagatctcgtggttgggtcttcggaagacaattggtcgtgaagcaggtcgttgggcgaagagtactcacgaaggataggagtcgtcacctcggtatcactgtccgagaaccagcgatcgtcgcttacgaccgtgggtcccaacgctgcaatgaggttctcgtcctcgaacttgcaggcgtcgacgcgcacgacgcactcgacgcagatgcggttcttacgcacctcgccgatgtgggcttcaacctcgtacagttgggagcagtctctgcagaccatgtgaccgcagagctgacagaagaagtcgcggcggatcaatgagaaccgcttctggcaaatggagcacgacttcagctccggatcacccacggacgccgtgtggaagtacacaaacgactggaagtcaaagcgacgtcttcgaatcacacgctcaaactcgcgtagcgattgagtgagcaggtccaggacgtgcttcgcttcagggttcatcattgcagcccgacgtcgcgttacttgagacttgttcggagctgcgattcgcgatagtgggcccgggctgtaggcgccgaacgcctcgggcggtgtcaccgcagcgtacccgtgtgctattatggtggtcgattggctgctgctaccgccaggtgctggtgtggattggatatcaaaccccacagcaagatggtcgagctggtggcgcagcgccgtacgctcggagcgaggcaccagttcgtcatgtacatgcttcggaagagtcttcatcacgtgcaccgcgcggtccttgcttgcgtattggtgggtgaacgacgcaaagcagagcttctgcggcagccggtgcttcttcgactggaacttcatgtgcagcatcggctgcagcgtcgccatgttcacggtgatcaataccttctggccctcggctccttccggaggtgagctgttgtcggataaagtttgacgcgattcctctgagaagtggcaacgctgctggaatacggtgcgggcgtcacaaaactttttgccgcagagcgcagccatggtgctctggtagtcgctggactcacggttgattaacacgttgaggacttcgttcaagtggcacttgatctccgtcttggccagcgacgcgtaggccagatccatgtcgtccgatctgttggagctcggcatcaattcgtacgctgcgatgcctcccttgcagctcttgcggcgccacagcgggctgcctcgcgcatccatcacgatggccgcgtgcagcttggggacggtggccaacaggtcgtcggccatctgctggtccgtgaacagcatgctctccttcccgcgactgcctcggatcgccaagccatctcgtcgctgctgctcctgcggcggtcggtatgagttgaacgtcgacaacttgcggtgcgacgttgacgcgcgggcgcgcgatccagaccgacccgaccggatgctgcccgagcgaccggattgagtgctcatgtcggagttgcgggctgtttcgttcgagcagtgcgacgcagattaaggaatgagtggtgacatgcaagctgctcacggagcggagatcgtgttggtcgcatcctgcgcggcagacggccgtcctggtgagctggtgaggatgcaagtgggacgagtccgtggccacgttgcagcaggatagaccaggtgccacccctcaccaaaatgcgattcctttatggactcgacagcgtatgacgctgctggtgaaggatgaagggcgctggcgaaggatacagaggtgtagtcgttcatctttttagctggacgctctgatgccgtcatgacggtgataaactactcgccagccgcagcaacatcatcatacaggtatgatagaggaaaatctgctggtcgtttgctcctcgatcgccgcctctactcacccgtcactataatacgagcgtcgttcgtgtggtacacgagtgacgacgctggaagagatcaagcaatcgctatgaacgcgtcactttggcgccaccgtggtccactcgcaacgccgacggcattggtcggacgtgaagcgaacacctttagtctttgagtctcacgatgccgttaatgtcggcacaggcaactcctaaggttttctatgggtgagaccttgttgaattcaacgatgcgtccgtattgtgctgcttttacggcccgagcactcgcagtaatctgccacgcatgagaggacccctccgtctgccactggcaatagcagactgccagactgccactactagtcgaccaggtgacaggtcattatttgaagtcgttttagtttaccggataggtccagctcgtccagacgattgcacaagccccacgcatactggtctaggcaggcacaggaattcgatttatggttttctttctgcatgctgccttgcatcaatcggtatctttgctctgtgtgggtctggttgcatagtactcggtgaacactagcttggatgacctggcctgcgtaggttcctcacaacccgcaccaacggttcacgcgattaagcatcttggttcagagtattcggtgaacagctcaaaacatcagcgcgtttgtgcgatcgcggggtacggtatcggcagagacagtcgtcaacaacggacccattggctccgtctgcactgatagcatgcaagaaacaacgtgcaccgtgtatttggctcgcattatcgcatcgcagagctgctcgtacttgggatatccgaatcatccgcttcgcttcaacgtgaatccgatttgacggggtaacggataaacagcgcctaactcatgtgtcccacattatcaaatcattctgacaagtttatgtctttcaatgatttacaattcggtaaatgcctcctttgctcagcccacactacacatgctataacgtaggctcattctgaaagacagtactgaacccatttcccatccgttacgagaaaaccaccccgagctgcaggcggcgcgacatccttgatatcattcccagaatccgccctcgactgcaccatgaagaccttcgccgccgtcgtcgccctgctgctcgccgtctcggcctccgcccacgaggcctcccacctgaagatcagcaccaacgccaagagcgtgagccagcaccacgtcgaggagcgcgtggtggaccacaaggcgctggccaagaagcaggacatgttctaccgcatggcccacatgaagtccacgccgtgggactcgcagcccgccgagcgcgaggccaagtgcgaggacctgtgcatgctcaacgacttctgggagttccagcaggtgcgcaactgcctcaaccgcccgacgagcctctgctccatctacaagacgggcctcgcgtccatggacgtggtgctcacggtggccgagtgcacctgcggcgacaacagcacgagctccagcacgtccttcgacgacgactccggcagcgcctagagggtggacaaccgttgcgtggatggacttcagctttacaccacttgtacaccaatacacagcacgtttgcattcttactcttgctcgacgtgcgtcatgaggttgcaacgccggcaaggcagaagcatgaagcggcggctgcgttgatcgatatccgtccagccgccggattgctcagcgctaaaatcatggtgagctgggaagcagcatcgccataagatttaggatttatcaaagagaaacctaggaaaccttatcctcaggaatcatttaacaagagccaaaactagcttcaaataccctccgtgttcctataccccgccaaacaaaacatgatgtaagttacgtaagtcacaacagagttgcacatcgccggtgcatgtttgcctgtcaacgaacaccgctggccgcgcgccattccggaccggcgcttcctcctctctgccatggcgctcattcgccaagttccagcctcgcgaccaggttccgccgttgcacgcagcctccaatgtcgctgcagggcctcgacaccgagagatcgtcgctgattccaggcgccgacaagtctttcgtggcgccgactgcttcgtcgcggaaccccagacgaaagctcccccgtgcttcactggttgcgttgctctcgtccttcgccatcgcggggctcctgctgctgctgcaccgtacttcagacaccggtaacggtatcacccccaccggtttcagctcgtactcgccggctcctcgattccgcgtgagctttccggcgtcgctgcatgatgctccgatcaccggccggttgatggtctgcatcgccaagaagcacgcggtcaaggacccgcagggggaggaccaaccaaggttcttggtggacgactcggcttctacccagcagatttttgccgttgatgtgtgggacttcatgcccggtgacgttgggaaggagaaccgtgaggtgaatgcgacccacgcggtgggctatccgatgctgttcctggacgaagtgcccgcgggtgagtactgggtgcaggcggtgctgcacccgtacgtggagtacaaccgctcggacggccagaacttgcagctgcctcggttcaccacgttcgagagcgagggtggtgtgctcactagtccgggcacgctttacagcgctgcgaagcttgcgctctacgaccccgaaacgttctctgtggatctcgtgctaaccaacgttgagccggagctgccggcactggaggagccgcacgagctgctgaagcacgtgacgttccgcagtccgtcactgtcggagttctggggaacggacgtgtacctgaaggcctgggtgctgctgccgcaccgcttctttgacgaagagatgaaggacgtgcactacccgctgttcatctaccacacgcactacaaccgctacttcgagcacagcttcttccccgctccgcctgagaacgccacgactgcgtcgctaggtgagcagtatggctacttcttctactccaactggacgtccgacaagcccggtgatccgtttactaacaagcgcggcattgtggtgcagctgcagcacgccaacccgtactacgacgactcgtacgcggtcaacagcgccaatattgggccgtatggcgacgctatcacttacgagttcctgccgtacatcgacaagaaattccgtggcattggcgaaggctgggcccgcaccatgtacggcggctcgactggcggctgggaatccttcgcggtgcaggtctactaccctgaagagtacaacggctgctggtcattctgcccggacgcctttgacttccaccgcttccagcaggtcgacttgttcgccaacaagaacgcctactacgctcgtggcgactggacccagaaggaccgaggtgccaaacgcgattaccttggtgatattcgcgaaactatggctgaagagaaccaccacgagcttgcaatgggatcacggggacgctctggtggtcaatgggacgcctggcaagccgtgttttctcctgtgaacaacacggacggataccctgctgccatttgggacaagctcactggtgaagttcacccggaagttgtgcagtactgggaggcgcactacgacgttcgtgccaagttgcagcgcgaatggaacgctcgcggacttggcgccaagctcgtcaacaaactccacgtctacgtgggcgtcaccgacagctactacctgaacgacgccgtgttcctgcttgaagactatctgaagaccacaaaggagccatactacaacggatccatcgtctacggcgtcacggatggccgcggctacgagcactgctggacgggcagcttcgaccagtccatctcgctcggatggcacaccgtcaaccagcgcatgctccctcagatggtggatcacatcgttcagtcggcccccaagggcgcggacctgagctttactaggtattgatgcagcgtgcttgtagacccagccaagtgctcctcgtgggctttacttgaaaatagtcatcattatacgtttgaatttgcctgcctatcatctaactactcgctgtcgagatggccgtgttgaaaacgtcgtctccatcccaacgctgcatttggttcctctgcagtagatcgtcacgagcgatagccatcgcgctttcagacagagcctcgacttcacagttccggcaaatcgtgacaagccgctgcttgagtcgttggtcggggaggacgaacgtgagctggtgctgcctccggcagtccaggcacatgtagcgcatgcagattttgcagtgcctcctcttctgcagcatcttggagccgcggttcgtgcgacttgcggcctggacaaacaccgactgcttcttgccgcagccggagcagcacttgtcgtctagcgtagagtccccagctgagctgtccgtggtgcattcggagctcgaagacgacgtctcgccattgtagcgctgtcgaagcgcccacaccagcttcttcatttgcgcgcaatatacatctttggccacggacagcagtatccgagctgctgatcggatcacaatggtgcgcatgatgcctcccgcaggattgaagaagcccttaatgtaaacgtccgtcatgttcgtggttcgctggcgatacaaaatgctgatggagctgttgccgcggaagtgagaatcgagcggcggcgtctcggggaattgaaccgagtgcacaatgtgataccctacgcgctcgccattgcgtagcctctcaattcctgttgtctccatgtagacgaagtcgcgatgtttgaccactggtcgaactgccagcggcacgagaacctctacccacttgatcgtcacagcgttgaagggattttccgaggtggggctcacgaggtttgcaagcacgcagctactggggatgtcgtcgtggatgtaggacgtcttgacgcgcatctgctccgtggtagggcaagtgacgccgtacattacatcgtcgagatcgcccacgatgcttccggtgatcatgacaacaggtagatccgccgccggcgtctccagttgatacgcgctctgcgattccgacgcgcgcggcagctccgcgtaggcccgcagatcgtccttggacgagacgaacttccattggctttcgtccaccttgccttggctgtcaatgaggaagccctcgtacataccgatgttacgagctaccagcttctgcgccaggttctccatctccgcggcggtggtcggcgacaactgcagcggcgggaacggactcgtgtggtgcttgctcacggacggatccatcttgacgccagcgacggagcctgcagacccagcggataccgacgagtccgcaagctttccggcgaaagggtcagtgaagcccattgccgcgggtgctacagcgtgtaccaatgccgttgtgtcctccttactcgagccgagtgcgctcccagctgcatgatctctcttgcgggaacgccaccacatgatgctgatccaggccagcccaggccatgcgccatacgtcagtcagtcccatcccgttccagcgcgcggacactgcaggatttgaagtgttcgtgcccattttcgagccaaagtcacagcagagagacccggcataacgtcactttggctcaggaagatagagaatcgagctctcgagacaaacgaaacgcgtggcccctgtttgtcgtccaccggcgaaagcaaacaggactccgcgtggtcagacgaagagatacaagtcattgttggcattgaccgacgatttgtcaagtgcacaacacaaccagcttcagcgtccaaaacttcaacggcctaccggtaagactgcgcgcacttggacctcacgctgtagcggtaacaccacgccgtgatgcacagctggatgtccgagagagactaggcgacgatcctggctctctcgggcaggatggggactccttgctcaccaagcaatccggcgctccttgtcattcgagcagagtcgggtgcaatctcttcaactgtatcgcggctttcggcctcataaatattgaactgttgttatcttacgctacacgtaccctaagccaggggcggctcagttcagctcgtcgaagagggagatctccgtgccggacgtgatggcgcacagctcgttccggccgtagacgtcgttgaagagcagttcctggctggccacggtcgccgccttggcgtcgagcgcttccctgtaacaccgcggacagaaggccacctcctgctgcaacatcttgcggtcaagcatcatgaagtgcagcttcctctggattcgacagcctgagcacacgtagcgtgaacatccgccgcagcaaagattgcgatgcagcagccggcgggtgccagaaggtctggtcaagcacgcttgtacgcagaccgcggagctctcttgccgctgctgcctttccatcgtaggacagcgctggcggatactccacgcgagcttcttcatctgcgcgcagtaaacgttcttggacacggacagcagcgccttggcagctgaacgggtgatgatagagcgcgccaacccgccggctgggttcaagaagcccttgatgaacacgtccactatgttgctgtctcgctgctggtacactgccgtcatcgacatgttgccccgaatggccgagtctcgagcgggggtctcggggaactgcaccgagtggacgagctgatagccgacccgctcgccgttgcgcagggtccgggtgcctgtcgactccatatacacgaagtcgcggttcttgatcaaggcgcggacgtgcagcggctgacccttctcgacccacttgacggtgaccgagcggaacgggtgctctgctgtaggcttcaccagcgtggctagcacgcaggcccggtacatggtgtcctggatgtacgacgtcttgatgcgcatcatgtcgagcgtcgggcatgtgaagccgtagatggtatcgtccatctccttcaatactgccggccacgagcacaatcggtagctcggaggtcgacgacgaatgcgatcgggggcgatgacaagcctccgtccctggaatcggcgtggagagcccggcgcgttcggcgtaggatttaacgtcgtccttctcgtacatgaacttccatcggttttcgtccacttggctgttctcatcgagcaggaaatgctcataggtgcgaactagcgctctgggcgtccgctacgcggacgctagggcttgatttgttagattgcccgcctccacttcgctgcggcaggtggtctttaggtcttgacgcatttggagtttacctacttatctgctcagtcaaacttttatataattacgtgtatacttctccggtccgctaaagaattaacagttctctaatcagactatatattgcgttctacagctccaacagagctgtagctgcccttaaatttaagctctggatctggtgtataacgtagtatttttgataaatccattttcccgccctttcaggtagttatcgggacgtttaaacaatctgtttccacaggtgtgaggtttaaattcgctgcgccatcaaaaatgatcagattagaacttggaaatacacatgagaaagcggaaagagagtttattcctgtgatataatgtcgtaaacagttgaatattccaaggcaagaaaaacagccaatcgtgtttgaggtttgttgcatacaaatcactgatgttagagttttgtccaatgaagtgaggtacatagaggtaatatgaccaatcatacatcgagatggtttgaggttttttatggaaaacctaactgttaattcttttccggaccggagaagtaattacttgtgtacagacaacgacttacaaagccggcagacacaaaaagccggcagacgaagtcaagcaaagcttaatataagcaaaccagccaatcagatttaatcaaatgacttcatctttgtataccatttggttttgtgtactttatatgttttcgtgtgtactttatgcaacacgccgtgtgttttatgacagttttacagatttgacgggagggaatttatcgttgtttttatataggaggatggcattaagcatgccggctttgtaagtcgttgtctgtactcacgtgctttttctcagattggtaacacgtgtttgagttaattctgtgtctcaatctctcgcgatacactatgtttttgtgtgaacattcccttcctcatcgattgcctccgggtccactgcaatcttgatcgccttccttgatgtaactctcgacagcgccacgtagagttgtccgtgagcaaagacgggtgactctaagtaaattcccacgtgatggatagactgtccttgggccttgttaatagtcatcgcgaaagctggtacaactggaaattgcttgcgcttgagcttgaacgggaactctctatcgtcatcctctgtgtagaagatgatccgcggaatgaagacctttttccccttgaaaggtcccgacattataattgcttcgatgcttttctcgcgcagagacaacacgcgaagccgtgttccgttgcacaatccagcatcgctgttcaggtttcgaatcatgatgatgggagcgccaacccataacactatcctgtgcgggggaatgccagaaaagtttaacgagttcaagaactcttgctcaaacatattcgggtccgcaactccctccagcgaatcattggagagatactcccttgtgtctcccgaaagacgcgcagacaccatgtcattgatacgcctgacacttgcgttcgtaggtgctagaatggctcgttcaacgaagtactcatctggtaagtcattgttttctacgcttgggtagatagcgtcaataagagcgttgacattacgctctcggcgactgtcatctgggtcttctgtgtcttcatgatcctatggcggtagaagattaaagttgggcggcgcctccatctcgtcactctcttttgtttcttcatcaaccacagacgatgattcggtatttcccggtatgatgcacatatcgcgcggaaggcaaatatcggtttcaccgatctccgagttgactggatagcggcccttgcctatctggagtaagaaatcagagaattcagctaactcggctgcgctgacctggtcaggagctgtccacacacgcatgttctccgttagccgcacttgacgcaaatgcccccagagtggcgaagatttgaaacaggccttcactgtctcggccctcgtagcgtccttcaggactggcaaaatctggcgatgatctccactgaacaccatcatctttcctccaaacggctcagtctcattgtgcatgatatcgcgaaatgttctatccacagccgcaaagcacgcgcggttcatcattggtgcctcgtcccaattgatcagacttgactctctaaccattcttgctttagctctatgccaggatagactgcaggttgcaaactcggacaacttgagcggaattcgaaacgtcgagtgggctgtgtggccccctgtcaaaagagtagcggcaatacgactggaagccacagcaattgcaaccttgcgttgcaagcgaacatgagcaagtatctgctccaacaggaacgacttgccagtaccacccggcccatccacaaaaaatagtttctgcccttgtaccggatgatgcaccgcttcaatcacttggtcgaagacttccttctggttctcgttcatttgatcagctagcatagcggtctcttcgagatcacttgtgctatacgcgtcgagttcttggtggatgatatcaaccggccgagcatcttgttcatcaacctccgccgcgacatcgctgtagaacgacaaatcaggaagaccgtagttttcgagtgtcttcccgtttgaatctaggtatttggccacatccagcaaggctttgtactcagccatccttaggcgaaagtccacctcgcgttcaattttttttttccgcatcataatgctcgatctgccgaacaatatcctcggacatttgcaccttgaagttgtcccaaagttctctggcgttgcgcggcagcgaatacaccaggataattttaaatagctgcctcagttccttagccatcatgaacaatgccaactccgccagacagtcttgccactcttggtcgttttccaagtaccctgcagctgcagccgcctcttgataagtggaatacaagtgaccattaatccttcggaggtcctcgaaagatttaggagaccgcctgtgacacaacaaaagtcgcaggtaaaacctgtccggatcttgaggcgacacatgcaccatgcgtcccagcgaagccacgtattgtttatacggttgccagtgctttctgtcctctttaacccagcggtattttgtagggacatctttgtacagaagatcggccgttccaatggggtcgtttgtacacaacttgaaaaatgcagttagcatcgtattgacgccagtccgcaccaagtttcgcagttgtcgattcgtcgcgtgctgtcgatatgcaaccaagctcataccctccaagtgaacgggtaagttcacaactgagtgcgtagacccttgagttggatgtttcaacagccgcatacaggcttcaacaggaatgtagcgcccgagcaaatactgaagaatctcgttggcttgaatctcttctccttcaatagtggtcgtggtcatatccgagcccttatacacgtacttgtagatgtacttgacagccctgtttgtcgaacagacttcgacgttgatgtggcaattgtatttatgcgatagaaatgggttgtatggcacaatccattggttgatcgtcgcactgtcccacactttacctttgtggaccacaaacccaccggaacggcgtttccgacggtgtccaggactcttatcctggaccatggtcgttatctcggtaagaggcttggggaacttcttagagcacctaacgttcttcttgcaggggcagttcagattctgtcttccacatggaccgtgcatcatacttgagatcaccgtttcgtaaagttcggggtgcttatccttatcagggagctctgccgacactaatcggtccacgtctactgcggacacgggtctatcttcaggtcgcagaattagaagaatgtgtgcgtgaggaagccctcgctttttatattctaccacatggacccgagcggcttggatacccaggatgccttggtcgaggtctttgttaaacgctttcagcttctgcatgaatactcgcgcaacgacatcaggcctgtcagtcgccttctcgttcggtcacagattctccttgatttctggccagttagggtcgcacgtcatggtgatgaacagatttggcgcgccggtctctcttacgtttgccatagcgtcgaggaaacgttggtacatgtagcggggccctcccgtaaacgtgggaggtataatattcttgcgcccgatgttttcggcgtcaggtgtatcgcaattctcttcttcacgaccggtctgctctctggtagacccggcagcgcgtcgttccacctccgcatcagctgcaactctgtgaacatcaatggtttcgctgcgcaaagcatcgcttagtctctgaagtgtctccagacggtactgaagttggttcagttctatgtagcgtagccgctcctgctcacactttgcccactggtctacacaatactgctgtgtgagacgtccacctcgcgggatgagagacttattgccgacctgtcgtacaggagatatgcctcgaactcccttagtgacatccgtaatagctctccatcggaaccagtcggatttcccacgtacggaatgccatacgtccacccggtatcgccgtaaggtaagagcagtggatactgtagtgggtcgtagctgtcgctagtctcaaatatacgcttgaagccagcctgacgagtagagagcacaatatggcgagactgaaccgcatgctcatcaaccacaattgctgccacttcggatgccgttggggtgttatgcgtacccggctttgcattccgagacacatgcagtcggagtcggaagtcatcgttatgagggataaggttctgcaaacgcaatgcaggatcatcgtccggtatctcttctccagcggcccttcgccgttcctgttccgcggccgcttcttcgtaagcaggttgggcccgctgaaccaatatactccgcgcgtgaagaaactgttgcgcgtaagggttgtgcctttccataatttcatcaatcttttccagaaccgctcgatccaaaccgtctgtcatctgcatccgacttgtcacacgcgcattcatatccggatcgttgatgtagacctgtgcgtacattgaccgcccgttctccgacggcaataacgacccaattcgatggcaaaccgagcccataacgcggaagttgtacacaccatcccgagccacactgtgatctacagcaagagagcgcgaccgtgaagcgcccatcgacgtaaacgcgaagacgttgttgtacgcacgaatcgaacgcataaacgccgcgatgtcgaacagttgaagaaacactgagggggatgcgcgagacggtggaacgcggatcaagccgtttcgacagcagcaagcggcagtctcatcggggaatttccacgcattacagtaacgacacaccctctctgtctcgcgactatcgtccgtaaagcgcgtaaagtaatggcatccacctggaaccatggctggatcaaagtcttcgtagtatgcgagtccatttttgtactggcacgaccgcctacggaatcgctcagcttctcgtcttcgcgctttctcctcctctgtcaatgcctctcgtccgggctgccgcatcgcgatctcttaaagcttggcgctcatcctcagacattgccccgcgacgcgcggttgcagacgatgcatcggtctcacgcaagtctcgctgttggtcttcagggcggctgcatcgactggtttgttgagacgaccgattggattctcgaatgttttcgaactgagccgacgacatctgctctcgtctagctcgatagcggcgcgcgctggattctctgtcacgaataatctgagacgccgaacgattagctctactgcgctgcttccctctatcgttttctctaacacgatccagttgggatagagtcatttcagcccgtcttcgcgatcgcccccgccgctcacgcgtggttggacaggcctgacccgttggaactcctagcgcgaatgaagtgtcagaatcgccgatgccggttgtcttccgccgcaccgccttgaagagattgatgccttccttgctgccaagggatatctatgcctgtttgcaagctgcgtctgcagaaaatcctaatgtgaccacatcacctacgacatttccagtgttttataccaactgcaacttatacgatggtaagacgcctcattagccaagcttctgagtgtctgcttaatgccactgagctttctcagcccaggcaataaaccactttgggttgtaaggggtaatgggtcagttgttgggtattgctttgtgtaccggaacatcaactggtatcataggcatcgaaggagcgtttagaccggaaatcggtacagaacccaaaaatgcgtatgctacgtagcacacatcaacaaattttctgcgggtggaaatatgctagaatccccttatgtagcaaggcaaataccgccctcttttttcttgtgtgatgttggattgtatgtttgggtgtgggtgggtcggaaatgcggtaagcggttccagttgccgaagcaaaaagatttccgtcgccccccgaaaggaagtgacggtctcagttcgccgctaaacaaaaggtaagccataagccctcaagtcactgtccccagtggctcggctcgggtccccacccaagccacgtggctggccgcatgcactctatcgcggacacagaagcaccgaaccgaggtttcccccaatccaacgtgccggtcccatacactactagtgtaacacgaccactactccgagttttaaacaggcgacccggcaaagccggcttttatcgccacatggatctgccaaaactcggttgggtatgagagttcccatgccgctggcgggcaaacatgggcgcctcagggtcgcggctccgaagagcaaaaggtgcgacagagctaagtcttagtacggcggcgggtgccagctgcaatctttcttatcctaaaaaggcgtttaaaaaaaaccttattaaggatggtaacgggtttgaagcagaaagccacagtactacagtataatcatgccaaataattaaatcggacactcatacaaagcagtaatgttgtggattcagagcgactgtccggcggctgggccgtccgtgggtgtctcggcgcggagtgggccgtctcgtaggtatggcggcctactgcaacatcccacggactcttgaataggtgtccctaagaacgcctaatcagcaccagtctacccctaattccgtactataaaccctcgactgccctgaaggtaccagttatcccaacaggcggaactcccgaaaccgtaaagtagtttatttatgtatggacatgcagtactcactgttgtgtgtgtccgctgtcgctgcagttcgccactcgcttctctacgccaggcgccctccgctcgctgcctcggtccgtccgtccgccgcgcgccaactttcaaatgggggatgtgataatcacgcccgctaaagtccgaccggctccgtgtaagtccgaattttagcgtgattgtggctatttttgtaacttcgtagatagttaaaaagccagttccagtcgacttgatgagtgaataatgtatgcaataaggcctaggtagcgtagtctaattgacaggtctaggctgtaggggcggaaagcgtgacgcgatgaccggagcgcctcgagctcggatgttgcttggggtgagaggtcaagcggctcgaacgggttggtgaagcgcttgctcgatctccacttcatcgtgtggagacttcgggactaaaatcgaaatggacactaccagcgatatgatcttgatggaactttggtgttgatccttgcgttggctccaccgttggactgcgacggtatgcgtagtggagggatcgtatcctggcagttccagatccattatgcattgtgatgtttcgactgagagccatccggcgccgacgtcgccgtcaggaacggagaagcgacagcagatccgcttcgctacttcagtgctctagcaatcatttccacttcggtggggaacggacatcactctcttcgacgcgaggtcgttcgtcgctcgtgccttcgcatcgccaccgatgcttcactcgagattgagttgagcacgcctatcggctcaagacgattggggcgccggctttccggccaagaccaaagctcagctcttcacaaatgacgagcacttcgttcgtcgttgctaaaagcgtttgttacgcgccgccgacatgtcgaaggggctcaaagtcaacgaaaactcaaacaacttgggtcaccgtgagtgcgtgcggtcggggtttccttggatcggcatctgagccctatgcacttcagcttcaacgccggccaccacacgatccgcgattcaaaattcactttcgcggattcgacgttttagtggaacggcgagtaccgtaacatcccgcactgagactcgatgtctgtacgttttgggtggcttcgcagttttgcagctctgcggcacggcattcggcgcaggcgccttcatttttctgattctcgctccgcctagccagctgggcccagtggtgacctggtcgacttgcctgtgaattgtcagctttcgaatcgtccgggctggtggcgactccaaggcgtgctagctagcacgacgtcgaggcacgccgatggacaacacaacatgtagagacgatcgcgttcaagattcaccgtcagagggagggaaaacgtagtggtttcgttatgcaagcacgagctcattgtacatggggacttcggacacttcgagcaccatgtgcttggtcacggagtccgtgacacggacgcagaggatcgagtcagctaggaaacctgatcgcgcccatccgagacgatcatgcccgacatgatgccagtctgccggtcggggaggtctattccaagtttcttcgtatgcgaaaccgatatgaacccatatcatcttggtcagggtagcgtcagattatagtagataacaggtaaaaaatgtcatcactttcgcgtaggcaaagttgccgtcatcggagagacacaggccaagaacccgcaccatgtggtggcggcgccagcatactcaagcctagatgttagcccgcggctggctcctttctgctacgccggatcagcctcaagcagctcgctcctactccatccgagtcaccgggcacctggccggcacttgggttcctcctcattctcactttgagctcgttgccgtaaaataatacaaacaggatagaatgtcgttccggcagattgcgctcctgtcggcggcactgccggcgatggcccttgccggcggcgacacgtacttcgccggtgaaggcacgtcctacacgctgggccaggtgtcggccggcaactgcaatttcatgtacgaccccggcgtgggcgactactacgcggcgctcaacagcgagcaatgggactcgacgctcaactgcggccggtgcgccgaggtctcgtgcgccgactcgcgctgcagcgacacgagcagcaccgtgacggtcttcatcgtggacaagtgccccgagtgcagccaaggcgacctggacctgtccccgaccgtgttcaagcagctcacgggcagcgacccgtcccggtacagcatcaggtggaagttcgtggactgccccgtgagcggcaacgtgcagtactgcaccaagagcggcagcagcagctcgtggctggccgtgcagcccgccaactttgccaacggcgtggcgagcatgaagatcgccaaccaggacgtgaccatggtggactcgtgctactacttcctgctcaacggcggctcgaacgtcgacatgtcggcggtggacatcgagctcacgtccatctcgggggagaccatcaccgagacgctgtcgctcacggccgacaagtgcactgacggcacgtccaacttcggcggcagcacgacgcagcagagctctaccagtcaaactagtcagacaacgtcggctcctgccacgacggcaccagcaccggcaccgacaacaccgacaccgacaccgacgactgctgctccgacacctacgacagcaacgccgactgcgaccacggctgcacctgttactagcggcagtgcgtctcagtctcagacccagcagcagcagagcgatgtcagcacctacttcaactcgctgacgacgaactcaacctcgggcagtgataacgactacaatgcaggcaaggtgacggcagcaaccgagtcttcaagcgatgtgtccatcctgcaatcttccgaggctgacttcggcaagacgtccagcaccaagcagtctgactcagacagcacccaacagcaggacgactccgacagcgcggcgcagaagacggggtcggacgacaccaagcaggcaaacaccaagtcggaggccacctctgccggcacgagccccgtcattgtgactctccttgtgctggctgtcgtgggctgtatcgcccttgccgctgtggcctacgttaccaagaagaagaaactgaatgacaagcgcatggagcgtgacgcggccatgatccggtccttcgacacgctatgctcccccgtgcacatcaacgagaccaacatcgccgccatttaagtaaaagccctgagatttttgacttcagagtctcccgtatgaaaggcatggccagcgcgtgtcggcaattctgcaatggagcttagacctcgtccggcaacgtgtagcgcgcgcttttatttctttgttaaaccccctactgtaaaggtctagccattgtagtcgcagtaagtaaaatacagtacgatggtggtgtggtgtccgcatcaacttaataaaatccctctttggtgcgtgcaccacagctccttgattcacttgcgctctggagctatcttgatggtttactatttagctcttgcgatggagaagtcctgcatcgccacctccagcacagagctcgagctttccttgaaggatctttgacacacgccactaagtgcagtatcgcagccgaataagctcaatggtcccagcgtgagctgttacgtctccactgcaatgcaagggtggaccatgaagatttatctgcaggaggctaattgaagccaagcagccagtcgccacatgcgacgaagcacaagctgttgccggaaatacacaaacatgggactgatttctgaagttgtccaggatcgcaatgctgcaatgcgatctatcgaggtagtgccaataggtagacgcgtgtagtcacgctgtgtggctggagattggcgtggttggtagtgaaacgactcgactggagtaatcgacagtggcaaaggtgccggaagctctgaattcagggtggtatcagctcgataattgcatgaacagtccagcgcaagaactttccagaagagagaacctcgatttccttaagctcggagccggcagcgcaatgcattgagcagctcaccatggtacaggcccaccggttccgcagcgacagctacgacagactgcgtgtagcgtagctaatggtgtcttcttgcaaagagtcgagaatctgatgtggcaaccgtcgacaatgaatgcatcaccaccatttattccgaccctgccagcctgtcctgctgccccagcagatagtgtgtttatcgttacagcctggagcacttggctgactttgaaacgacacggattgcgctatgccacatcaggccgaaacacctcgcagtatcctcgttgaaaccgttcgtcgctctctcggtattcgtcggccaggacgcaggatccttcctcacttttgaatccaacaccaaccgcaacaacagcgacaacttcagagctttcagctacttcgacaacagcatgcattcgaacacccgattccgactggttttactggcaagcgcggcagccttcagcactgcgagcgcctacagtggatacgggacagtctacggtccgattgagccgtccggcggcaactgcaaccttcagtcctaccccaaagaagcagtgaccaactacgcggcgctcaaccgagtgcaatgggacagcaccatgaactgcggccgctgcgcgaaagtgtggtgcaccgacgctcagtgcgagaacccgtcgagttcgtccgagatcgtgtacatcattgaccagtgtccgggctgcgaggaaggcgatcttgatctctcgccgtcggtgttcgaggccattaccggcatggaatacacgaagctcaagatcgaatgggactacgtgacttgcccgagcaccgggtcaaatcgaatccagtactgcttgaaggagggcagcagtggacactgggctgcaatccagccaacgcacatgtctgcaggcgtcgactccgttctgatcaacgacaggcctacgacaatggtggcgtcttcctactacttccttctgacaacggagactgatcaactccctctgcccgatatttcgaacctgaaaatcaccatgacaagcatcgcgggcgaggtcatcgaagacgtcgtgtcctttgcaaacgcaaagtgcgtcgaagtcgactcgcagttcactgccagcggaagcattcaaactgaaccggaaaccacgagtgtatcttcgacgaagaatgccccgaccgaagcatcgactgatgccccaactgatgccccaactgaagcaccgactgaagcaccaacgactgctcctccgacagacgcaccaaccagtatccccccaacagaatctccgacgagtgctgctcctacaaaagctccgacaccagctcctccgacggaagtcccgacgagtgctgttccgacagagcctctggcgactgttgctccgactgaagctccagttatgtcgagctataatcccacagatgcccaaacgagtgcttctccaacgaattctcccacgagtgcgtatccgaccgaggtggcaacgaaagcaccttcaagcgaagctctggcgagcgttattccaacaggaacccgggcgagtgctgttcaagagagcactgcagcgtcagaatcctcggcaagtgtcgatcaggctggtgtggtatcgacggatgcctcgacgagttctgctcaagcgagcgctacagcgtcatcatcggcaagtgtcgatcatgcaggggtggtatcgacggattccccggtgggtgctgttcacgtgagcgctgcttcgatggaaaccccgacaagtgcatcccaaacgaacgtcgcgacagcggcaccatcaacgaccgctgcgaatgccgctacaagtgctccatccgtcgccccaacggacgctccagcgaatgcggcagcttcttcatcaagcagtcattcgtccgccgacaacaccgtgattggtgggccgaccgagtcgatcagcactcaagaatcctcgggatcaggacccactatcatcatcagcgttttcgctgtgctgggatgcctcttcgtcattgtcgtcttcgtcatgtacatcgtcatcaagaagaagcagcagctgaacgagctgctggggcaagagaaaacgtccgacgtctctcgctactcgtgcgagagcgacttccaaaccaacatccccatggacgagcacctagctttcccgtacgctgcagcagccacccctcagcccgtcagctccaccagcatctaaatggatcacgagtacctcacacaagtatcgttagatatatctgcctagaacgaataggtcgctaacaacaacatagatattcccgctctacttttgacaacctgcgctgccaagccactggcttgaagccagccactgcgagcctccacctcaacaaaatccgcgcagattcttacagcttcaacttacgcctggggtgactagccatcttcttcgaagccatctcaacttgcgagcgctggcggcgtggaagcttcgccgacccagcgcgggcaacgcgtggtggtccactcgtcggcagtgtagccatcttgtgctgtacgaatcatctgccgagcagtcagcggtgtcccgtttttcgcactgtcgtcgcgtcgcgtcgcacgcttgacaagatagtgtgcaccacacaaaataaaaacatcttgccgtttgtatgttccatttgaagtagccgttaagtggcagctatttctgaagtttgtgacgcaacaccgaaatcgcgagacgtggcagatcttgccgccgttaaatgcgccggtcatgaacgcgcgtgagccggtctgtgtcctgcgcaggcggcgccgtcgacagcgatctcgtccgaggcaagcacgccagctctgctgattgtcgcacatgccacttcatcgcttgctgccactcatcgcggccgtcagcgctggcgtcccacgctcccgccacccaagcggagacccttgcctgtgggtggactatcagcgcgtcaaacggcggtgttgcgtgacaggcaagtcgcgccacgaggcccaccatagtctatggcatagacggagccgtttcctgcagctccgatcctcgccttcgagttgcgtcccatgctcgacgcacgcacgccgcgtgaccggccagagaccgtggccattgtcgacggtttccagcgaatggaagccgaggcgaacgacgccagcgagataaaagacgctgcactgcagcctgcagcgcatgaatcctgtgacggccgcacagctgttaacagctggaagtggtgctgctcgccgcgaccacacgcttcccaccttcgccgaccgcgccacgagcgactcatttcacattccgcaagccgcaaactcaatcgctcttatagctccgcggagtttgacaagcaacatggcgccgacaaacagatcctcacttcaacttgcgatcctccttgtgatgcactgcaactgcatcgccatggcctacgaagggtacggcacggtgtacacgctcaactcgccgtccgacggcaactgcaacttcatgagctggccggacgccgccgtcaccaagtacgctgcgctcaacgccgagcagtgggaggagaccatgaactgcggacgctgcgctcaagtcacgtgcaccgacgcgtcgtgcgccggccaggcgtccgagatcgtgtacatcatggaccagtgtcccgggtgcgcgtacggcgacctggacctgtccccggacgtgttcgagagcatcacgggccagtcgtacacgaagctgagcatcgagtggcagttcgtggactgtccgatctcgaacaacgtgcagtactgcctgaagacgggcagcagcgagttctgggtggcggtgcagccggccaacttcgtgtcgggcgtgcagagtctgtcgatcaacgggcaggagacgtcggtgatcgactcggcgtactacttcctgatcgacggcagcggcgagagcgtggcggatctgagctctgtgagcatttcgctgacgggggtgaacggcgaggtgctggaggagacgctgtccttgagtgctgacgagtgcaccgatggcgcgaagcagttcgctaccagtgacaactcccagtctatcatcattgccggtagctcatcgaagagctcgtccactcaatcaagctctactaccgcgccctcgtcggcaccgaccgccactccgacgccgacacctacaccgacaagcacgccgacgtctacggaggtgtcaaacacaacagcgaccccagttgtgtcttcttctcaaagctcgagctctgtcagctcggatgagggcgatgctgggtccatcaagactggccagggctccgctgcatcgagatcaagtgctctgcaggaaacagtcacagctgagccaaatgctgtccagtcgccaaccgctgcatcgactccgggtagcgtcgtccagtccaatgtgaagagctctggagactccaactcgacgtcgttgatggtcgggatgatcgtgttggtgtgtgtggctgtgataattgccgtcgggctggctgtctacgtgcgtcgccgcaagcagcagattgactcctacaagcgtcgcgaggagcaaggcacggcaatgtgcgacgacgacacgtcgcctcgcgcatcggacttgtcgtccgcctacgacatcgtgcacagccccacggtgcacttttcctccatggagtcgatggggagcagagtgtgaatccaaaatcggctctcgtgaagaagtacaagtagtgatcaagtccagcggatagttataagctgggtaggttagttagcgtgaagtagtgagaaaagagggcatagtttatcggtatttaggcaaaacaacgaagtatttcaaccggaagtgctgtaattacactgtacatgtactgtaccttgccaaactcgacaagaattgttgaagcatgcgatcttgtgcagagactgtgaaaagatctcgtttgactcgcccccactatgccagcgaaccgactcgcgcgaaatgaggttcggtgaagtctccgctaaaccactcgacagtgtcgagtggtttagcgtcgagtcgacagcgcctcgcttcagccaaaagcttggcttgctgggagccaagacagagttgcagtggcgtgcgtgcagtgttatcacttgccgtgcaagcgtccctgcgtctttacccaccaagaccgcaccgaatgcaactcgtgacgaagacggttgcctgagctcgacaccttccaggcacgccagtcacaagctgctcggaaagaggctccgttgtcgcagcgcgaccatagtttcaagccggaacgcggcactgcggggcgacagcgtgcaacagcagccactcgcgccccgaacgagctgtcaacgcctgcctcattcgagcgacgatctccgtgacatatccgagcagagaccgagcgcgtttgacggcgccgccatttctccggacgaacccatcgcgcgcggccacccgttcggcgagtcccgccggacgcagtgccactcccaagtgcgtggcgcgaacagagccggtcgccgattctgaaggagaccaagcggaccgttccacctgcagcaggtggagttgtcgcggggaaatggaacgcgaccggcacggtctcggcaaagggagccatgatgcatgacgtctgtgcgaccgcacgcatgctggtatggccatatctttcgcgcccgctttccaccacgtcagtgcacccctcggtctcttggccgacgtccgagcttgatagatcggacgcaaccatctagtgcggcactgctggcagcaagccgacaacgcgagcaactcaaccactttcaatttcgctgtagcactgaagcatccaaagtgcagtgaagtcctacccgtagtcaaaatgcgttcgcaacgaattgtcagtgccttactgctagccgtgccggtgacagcctcaaccacgtatgaagggtacggcacggtgtacacgctcagctcgccgtccgacggcaactgcaacttcatgagctggccggacgtcgccgtcaccaagtacgctgcgctcaacgccgagcagtgggaggagaccatgaactgcggacgctgcgctcaagtcacgtgcaccgacgcgtcgtgcgccggccaggcgtccgagatcgtgtacatcatggaccagtgtcccgggtgcgcgtacggcgacctggacctgtccccggacgtgttcgagagcatcacgggccagtcgtacacgaagctgagcatcgagtggcagttcgtggactgtccgatctcgaacaacgtgcagtactgcctgaagacgggcagcagcgagttctgggtggcggtgcagccggccaacttcgtgtcgggcgtgcagagtctgtcgatcaacgggcaggagacgtcggtgatcgactcggcgtactacttcctgatcgacggcagcggcgagagcgtggcggatctgagctctgtgagcatttcgctgacgggggtgaacggcgaggtgctggaggagacgctgtccttgagtgccgacgagtgcactaacggtaattcacagttttcgtccagtggggacagttcccagacgacgaccactgtacaaacttcgacatcaacaacgacgacaccgacaacgccgacatcgacaactccaacaccgacaactccaacaccgacaacgccgactccgacaccgacgacccgtgcaccgacaaccgcacccgtcacggaagcaccgacaactacaccagtgacacaagcacccgtcacggaagccccgactaccgcgcccgtcacagatgcccccaccatggctccagtgacggaagcgccgacaacagttccagtgactacggcaccagaaattgaagcccctaccactgctcctgtcacggaggtgcccactgctcaacctaccccatcgccgaccccgacacccacgccgacaccaacaccgacaccgacaccgactcaaaagctttcggcagctcaatcgccatcatccagctcggatgccgcaccggcgacccattcatcgtcagtcgaccaagagaacgttgttccagcgacgtccaccaaggctgcgactgtatcgtctaccaactcgacatcatcaagtgacgttgagcaagagtctgcaagcgcgtcggttgacaacgaagagcaaagcgccacgaaattgtcgtcgtccgcagagacgtcgactacagtgcagtcggacgcatccacgccggcgcccacttcaacaccgagcgccaccgtggcttccgtgcaggaagaagcctccagcagcggtggtctccactcgacggccgccatcgtcggcctcattgctgccgtctgtgtggctttgggggctgctgtcggcgtggcgatggccgtccacaggaagcgcaaactgctcgaagcgagcaagaacgcggaggaccgcgattcgatggcgtcgtacgtaagcgtccgcacaccaaggtcggaggtccctgtgctgcactccgcagtgtagagaggtgagcgctgaggagctcagtaaagcccatgcaaatgtgttgcagtagtgacgttagttataaactctacgtgaaagagtgtctgaagtgtctgataattcgaccgaagtcgttgagatatacatgtaccacgcagtaggctggtatctttctcgccattgcgtctaccgtagctcatcagaaatgagcatgcgtgcttgcaagttggcgcgttgaagctcagctaatcaagagggtggcgcgcaggaagcacgccattattgcctcgttgtcttcggtagcgtagccttcgacaagaggatcacgctgcaacgtccgttacccgcgtcaactcttgacaagctgaagctcgcttgacttcatcttatccgggtgcggtgcatcgataagaactgacagcttcatcatctcagtactatgagcaccacatgaccggctgcacgtgaagttgtgggcagcgtgaagaaggtcaatcggaagaagcgctcacagaccaagaagaatcgcgtacagtagaaggcacccacgcatatgacggctggattggcatatggctgcatctgggcatctgcccacttgcgtggatgctggccgatagtcgagcactgtgatttccatgctagacgcctaaacatcctttgaagaatgccagggttgagcacattcgtcagcaggcagctgctgcaatagagagaaggtgtccacgcagcttcttgatcgaattctttcagagttcacaactgaattttccagcaaacactcaagctactcaatacccaactcaaggtctttttcgtcttcactatggccgccattgtcccgatctcttgcaaccagcgttggcgcagtcgctctcgcaacgccagcacggactcggatttcctcggcatggtgcctacctctccttcggtcatgggtgagctcaccattatcccggtggatgaagctgcgtacgaaggcgacgacgaagacaagggcgtcgagcgagtcgagtcgccgcacaacctcgtcatgccccgcgagtacgcggctcaagaaccggcgtggcccgtcgtgccgtctaacaacgccaaagccatggagaggcggcgtgcgagcggcttctaggctggaagccgacagtgacatgatcactatgaacagtttgatgtcgtctaggtgtgtaccagtgtcgtgaacaatgcgtaatgagacgagtacaattctcggttaatatcagcttatacccccttgccttcaagtcagtgcgacgactcgcgctgcagcgacaagagcggtatcgtgtccgtgtacatcgcgagttagttatccgagtgtagtcaagtcaacgtggacttatcctcggccgtgctcaagctcgtaccggtacagccagcatcaagtgaaagcgagtggcgtgccgatcccccagtcttccgcggccggcagccaggagcggaacgacgagtctgtcagtacatgaggatcggacgataccaatcaggcggacgaacaccaggacgaaggctctcgtggtgctggcggttgttggtggcggcttcgctctgagatgctgttgcccacgcggtcgtgaggaaaaactagacaggaagcgcgacggctgcaatgaagtttttgccgcgttcagctcgcctgggcgtatcaactcgacgatcgcccagatcttaacctactaagtatgtggttcctttcgatgttctgacggagtatgtagctgcgatcaattgttagcaagagtgggtgctgatggagtttcggtacgatgtaaggaaaatagggtaacttgaagcggttcttggttgaaggacaccttgacttgtcatgtgagctcctgcgagcctgcattgacaagcgttcatgttgctgcctcactttcaaaggacgttggcggttaccaactaacaggtacatgttgaagtgatccaaccaatcatagacacataagcatctatgttttgaccgtacggttttggtttagtaaatatgctacgacaactttatcaattgaaggtcaagaccgtacttacacaggatcatttctatagtaccttcttttctacttgactttccaagtagacaacctcaataactttgatgatcgtattcgacttcattcattgactcgggatgtcggtggttgcagtgctgggtcctcttttggacctgctcccccattgatgaacgtccgctgtcgctattccaaggcagcgtgagtgagtggagtgatatgagaagttattgatttttctattctccctatttctctttttcattcaattttctttaccaatcaaactataatgcttctgcagtactacgacgtactccttcaacacatccgtcctttgcacaccggtatgtgtatgaacaaacctactacctgacactgagagcgcggaggtacatgtggtaattcacagcgctagtatttacgcggaagtatggaaacacgacctgtaagtggcttgtagaagtaaagcgaactgtgacttgagcaccacgagcagtttgatgtttaggtgcgtaccagtgtcgtgaacaatgcgtattgacaaggcatctcccccctgtgcgacatgctcgtgcagccttcgaacgaggtgacgcactgcagaagtttgcgctggagctgctcgatctgcgaggctcgagggctaagtgtagacgcctttgtcgtctctgaatctgctctggtgctcgtggctgcggcaacgttgtgtagatgcagcagctgatgctcgacgatgcttggactcaccgcagccttcggctgcacgttgagctcgttcagcgtccgccaaatggcggaagaccgtacttacacaggatcatttctatagtaccttcttttctacttgacttcctaaacctaccccgagacgccgatgctgtcgttgagcgcgtctccgtccacccgttcgcgttgcgcgagcgcggaagatggagacgagttctacgacgcgatcgagtgccctcagtcccgcgcgctacaggttggcggaaaacgccgccgcctcaacgacgttggagacgactgcgacgtgaccgagcttgtcgacacgaacgaggattgcccccgtgccccagcgcccaagccatccgcggctagcacctccccagcctcagttcggaccgtgtatgtgcacaacgcgcagcactttgagtgcacgctgtgcacgtacaccgctccaagcttcggctcgctgcgcgacaccgtgactcacgtcaccgccgtattgccttcttggaccgattctcggccggatgcacatgcgtcaggccgttcactacaagactggcggccgcccgccactctcttgcgtgcccaaccactatggtaaccctaccgatgccgacagcgccggcggtagaagcatcaagcttcgccgtcggtgctgacgatgcaaccgtcgacgttgcagcccccaccgcacccgttccgaccccccccccccacgaagaactagaaggaccccccatcccagccgtctgcgaagtctaccgcggtgcagtcggggccgcccgcgtagtctacagcagtacagtcggagccgtcagtggagaggccctcttcgcgctggggacgatcgctcccgcgaaattaggtcaccacccgagtggcgacccagattgccgaccgcctcggggcaacccaaccaaggtgggatcggccattaccccgtgaaataattgctcaacaaattgctacacgtcttggatcatgcccccccccccgtcggcatcgatgccacccaacgcgccgttagcagctttcgaccccgtcgccaatccgatttcgacgcaaaacaccgctgctgagccgacccgggccagcctacacgatgccactaccccactcggtgccccgtcgacgcaaagcaccgtatgaccaagtactagtactgccaacagcggcaccatcgacatggctgacagtgatcctaccagcaatactgacgtcgatatggacgtcgctggcggcggcgagcctccaacgatcgaggcggccacaaccggcgagtggttactgcagtttgatggtgcatgtcgtaagaatcccaaccctgggggtgctggcgcggtgctcttcaatcctgcggaggtgatagtatggacaggttcgctctacatgcctaacgccggagagaccaacaatacggcggaatatacggcacttctgcttggggtctgcgtagctgccgatcatggggtccggcgcctccgaatagagggcgacagcacccttgtcgttcagcaggtgcgcggtcgctaccgaacgaataatgcgaggctgagtgggctgcgtaagcgggttatgaccgagctccggcggctcgagcactattcgctacatcagatagaccgccagcgaaatggacaggccgatcgtcttgccaatcgcgctcttgatcggcgcaacacgcgcgctgagtgtggtgttcacctaacggctattggctgcacatctagggatatcgacccggcgcgacctctgaacgcgatcgcctcgcagccacccgaaaatcctgggtcccaagatgtacccatgtgcgaagaaacagtggcggctgaaccccctgctgatgctgacgatggtgaggtctacgcaccgatgcaggtcggcacagaggcggtccctaatcgccgctcgcgtctatgacttcgggagctcaaggccgaagaagaagaagctgcgtgtgcagacacggagcggctgggtgtggcgttagcagcgaagatcacagatgcagcagactggagtaccgctgaaggctacatttccgcgcttccatatctaatctacgagaaattgcagccgtacacggccgctgcatcgttagcggcggcggcgacgccacacgaccggccgcgcccggccgagcaatgcgctccaattggtgcatcgtcgcggcttcgtgccggccgcaggcgacgacgacggcacaagaagcaacgaccccgcgcaactcgaacttcaacaggaagaagcgaatcgatgaggcattagacaacctctatgcgatggaacgcaataatacgagtactcgccaatatatacgcaaggcgcggcgccgggttggtcgtattcgccgatctcaagaaaagcaacgtctgcgccatcgttttaatactgccgaaaaagactgcgtggcggagatcctacaacgtccagcagcagccaggacgcgagaacaatcagcagcagcccagccgaacccgaatctggtccacgacagcgaagacggcgaggatcccggctgccccctctccggcgagcagctctggcagtactttgacggtatcaacacgccgcggtccgagttcgacccgcaagcgcgcgtcggaacggcctttcgcgacgctgtgcgtagcttaccggccgcgactgcgctgcccgatcttctaactgaggccccctcggaagaggatatcgaaacgcagcttaaccgggtcaatttgcgctccagtccaggcttggacggggttggctacgatatctatcgacggtttgctgcccaaccgctccttgcactcgctgcagcgtttgtatgctgttgggagcacaagcgcgtccctagagttggaaacttggcacggttcggctgaactttaagaaaggatcccgtgatgaccctagtaactggaggccaatttggctgcagcagtcgatttacaagctgtacgcaggagtgctggcaggacgctttacacgctggctggacgctaatgagcgtcacgcccctgcccaaaaaggttttcggtctgtcaatggctgtggagaacataattttgtggcgtcgactctgattgaccaagcgcggcgaaagcaccgcgagctccggatcatttggtacgacctcaagaacgcatttggcagcgtactacacgatctgttgtggtacatcctccggttgctaggtgttccaccggactttgttggacgctgccagggcatctatgataatgccgcttttgttgtcggcaacgcgaaagatggaccatcggccccggtgtcgctgcgtgttggcgtgttccaaggttgtccacttagtccccacttttttacggcagtggttactccgctcttgctcgcgctggataagttaaatgatgccggtgtgaagctatcgggcgcggatcgaccaggcgtgtacgcatttgcagacgacttgaaggtcttcagcacgagcaaaacaggcatcgaccagcagcacagggtggtaacgaactttttgcactggacgagcctccaggctaatcccttgaagtgccgctcgctctccgtcacgcgaaacacgcgatgcaatctggtttcaggtgatctagcagctaaactcgatggcgaagcgattccgagcttgattttgcacgaggcgtacacctacctcggcatcggagacgggtttgaccatgccatgagccgaaccgagattactccggcaattgcagagctcaagcgcgacgccacagctcttctccagtctggtctcgcgccatggcaagtcgttaaggctgtgaaaacatacctgtatcctcgcgttgagtatgcactgcggcaccttcgtccgttcaaccagcagctggccggcttcgacagacatctagcgcgcggactgctcaatctctttcgcctaccctcgaattctacaagggcatttttgtatgcaccagtcacccgtggcggactcggacttctcccgctgaccgaactccatgcagctctacaactagcctatgggtggcaggtattgcactcaccagacccttcgattcagcgtattgctcgtactcagctccgtgatattgctgctgcgcgttaccaccttgaccatgactattggaagacccgcacggacgaactcgccgagatgctgctgaactctaagctgggcgagtctgtacatgcaccgaagaagaggaactcaagtgatatcggttctctttggattgatattcaacgccatttgacgtcgttcgatttgcaatttgaaacagcaccagcggacgccgccacggggatcccagctactgctctccagcttcaagttccccaccacaaaggctggctcgactacaagactgttcttcgacagctcaagatgcacatgaaataccgacactaccaccgctggacgcagatgatggaccaaggccgggtcgcccgagcgattggcggtgctggaagtgcgtttttgacttgcccacgcggtctctgggaagcggactaccgctttgcaattgctggccgactgaaccaagtcgataccaacagcgtgcttaaacgcaaaaaggttcgcgcccacgctacatgcagacaccctggtggctcatggaacgaaacgctcggtcatgtgcttggacactgtcctggtaccgaaggtgctgttcgtggccgtcgtgatgacgtcctcaagctgatttcccacgctatcgaggcatctccgcgcggcagccacggagaagtcgagttgctagtcgaccagacagtgccaacgctcccaggaccagcccttcgcccagatttgcagctctacaatcgtgccaagcgcactgtagccatcgtggatctcgccatcacctacgaagaccatcgtaacgactctcctggcagctcgtccctcgctcgcattgcagaccagaaacgcaagaaatattccagtgtgaggaggcatctcgagcggcaaggttggtcagttcaactatctgcactcgtatatggagtacttgggtctgtggcgcagggcaatcacaaggtactgactacggagctcgggctccttaaaagagacgctaaacgccttgatcggcaaatttcagcagcgtgtatccagagcagccgacgaatttgggcggacttctgcaggcagcacaggcagcgacagcacacaaggaaacggggtggtcgagcgacggagatcggggggtccccgtcaagtggccacagctagacgtactcacgcacgcaccctccgtaatggggtctccgccaatggatggtgtcgaggtattaaagtcacgtcggttccgggaaccgacgctgcgaaaagacagagacacttcgcgtcgactccgggagtcgacgcaccctttgtaacgaagggctccgccaataacaggcgtcgaggtgaagctggcgtgtcggctccgggagccgacgctacaggcggtgcggacggttgcgaacgtcccgcaccgaaaaaaacttgcatgctgtcgtgcagctgggctgcaggacgaatcaccgtgcgaccaagccgggcttgaagtcgctcgcccgcgggatatacccgccggcggtataaaagaagaacacccgtccacggctgggcctggtcgaggtcaagaaccaagtggagccgggcttcgcaaaacaagaagatggcgcatgcggaggtcgctgcgcaagtctcggcctggggccgagacgctacaagaaatgtgtgccgggcagacggaggctgagaagccggacgtcgagacgttgaacgtcttgacgcgtacctgtgccggattccggtgcagggagatgactctcgctaaccctccgacgcaagcgtcggagttgacttcgcttctagccatgagctggaagcgcttcgcgcgtgatttgcacgatggacgcatcgagcaaatatgcatcctctcggacgccgagagaacgaagagcgagaatgaagaactgaggcagttcttcatagagagcagaggacactctcagtgcgaacgcgaaaaaggagcgctttgaagagcagatctgggactcgttgaagaggagtccctactacgagatcttacgggagtgcgcggacgagcttccagaagagatccctgcggagcttccgcaggacaagggcatccagcacgagattgatctcgtgccgggcacgaagtactgtgtcacgcggcagtggccactgccgcaatagcaggtcaaagcgatcgacgatttcttcgaaagtcgtcgcaaagctggaaaagtgcgggaatcaaagtccccgcacagtgctccgacgttctgtgtcaagaagccacagggcggctggcgcatcgttcatgcatacaacaagctgaacgatgcgacgataccggcgcagacaccgataccgcgaaaagatgtcatcatcgattcgatggccaggagcactatctacagtgctcttgatctgcgtgatggattatatcagatcctcatgcgtgagggcgatatccctctcacggccgtgagcacgccgagcggcatgctctgggagtggctagtgatgctacagggcctgaagaacgcccctgcgaccttcaacaggtgcgtgacgcacttgttgcgcttggtgcgcgacttcgcaccgagctacttcgacgatgtgttcgtccacagccgggctgcggacggaatgagcgatgttgagatgcacaaggtgcatctccgaaagctgcttgcgctcatgcgcaagcacaagctctacgcaaacctgaagaagtgtatcttcggggcgagcgagatacccgtgctcgggtgtctcgtcgggaagaacggtgtccgccctgaccctgagaaggtcagagtgatcaatgagtggccgacaccgtcgaatgtcaaggaactgcggcagttccttggcttggccacgtatttgtgcaagtacgtgaaggtctacgcgggcatgatacgcccgctgtcccagctcctgaagaaggacatcgagtgggtttggactgctgaatgtcagcaggccttcgatgcagtcaagcggggcttgactgaggcgccgatcttggcggtggccgaccaagatcgcccgttccacgttgtgtgcgacgcatccgacttcgcaatcggatttgcgttgatgcagcacgatcacgagggtcgtaatcgtgtcgtcaactaccaatcgcgtcagctgaagccagctgagcgcaactaccgggtgcatgacaaggaactccttgccatgaagtacgcactcgcgaagttccgagtgtatctactcggaagcaaaccgttcgtggtctatacggaccacgcgtcgctgcggacggctgtgaagtcgccgcacatctcgcaacggatggcgagatggctctcattcttcgcagagtataagaagactcaatgtggtggccgacgcgctctcgggtcgacctgactacgccacgactgatgccgacgtcaatgcagcactccaatgtcatcactgttggacgacgtgaaggtcgcgtccacgcacgacgcggacgcgaagctcttgctggcctacggctcagaggcttctgacaaagctcgtcagaagctgccgaagcatcttcgtgctcgtgcacgccgttaccgggttattactctacagtgtagtcgacgacaacgcggaccgcgttgtcgtgcccaatggccatgacctgcgactcaggatcttgtatgagtatcacgatgcaccgactgcggggcatccgggccgtgagaagacataccttcttctcacgcgggacttctactggacccaccagtataactgggtgcgcaagtacgtccgtgcttgcgaggtttgtcaacgtgtgaagcctgcgcgtttcgcgcaggctcccttgcagtcactgccgactccattggaatgctggcgttccatgtctttggacgtcgtgttcggtcttcccccggacagccaggggaacgcgggcgttgtggtctttgttgaccgcttcagcaagatggtacatcttcctgcggtacccgctgaagtgactgcgaagcagacggcgcgtctgttcgttgacatggtgttcaaacaccatggcatgtcgatcgacattatgtcggatcgagacccgcgcttcactgcacacctttggcaagaagtgtttacacttcttgggagtcaactttcgatgtcgactgcggactatccgcagacggacgggcaggccgagcgcgtgaaccgcgtgctcgtagacgtgcttaagagctacgctcactcgttccaacactgcagcgagtgcctgccgatggcggagttcgccatcaataactcggtggatgtctcgatcgggcatacgccgttttacgtgaatgccatgagtcccgcgtctactcgggatggtggctccttccttaagttgaggaggatcttcaactgcaacgcagcagccgaagactgccgctgacacttgtacaatgtcagccgcgaccacgcgcaagaagaagaagaagacgggtctgtacagggctcagacaccgcgaagccgaacgcagtggccgggcctactgctggaagcgagctgaactcgttcagctcggaagcaatcaacttcgtgcaacgcagacaagccgtcattcggtttgaccaagacgcgattgcagcttctgttaatcaacagaagctgaacgcagacaacgttggcagaggcaacactaatgaatttgagaagggttcattagtcctgttagctactcaaaacgtgcctaaacatgcagtttccgacttcggggcgagcaagctcgttccgcgctgcatctggccattcactgtgctggcacagctcggcaacgcctacacactggacataccgcctagtatgcgcctccacccgacgttctacgtcggacggctgactgcagcacgagctacctagctcggctgaaccgaggcagacgactcggcggtagccatcatcctctccagcgcgacttcgcgctggagcagcgggtcgagctaatggtccagctcgaccggaacgatcgaggtggtctgggaggccgccgcaacctgaggatacttccgagcgccgaacccagcgctctggaactactccatcaccggaactcggtcgtggggagacgcgagatcaggttcaacaccaagttgaccacacacggggtatgtttccaccatcacagcagcaaattcgtgacgcacatggctcaactcgatggatagttgagcggattgttggtcacagtataccgaaaacgaacaggcaaccgattcgttttcgtatccgttggagaagattccctcccaaccaagataaatgggagccgcggaacgtcttgctcgaagacgtcccggacatgatgagggcgtacgaagcccaccacgcgctacacgctggaaagtaatacgagcgctgctgttaacagcagcacccgaaggcacttcgagggcagatataggtacctgcctccgtggcagcgacgcgcttcgcacgttgccgcacattatacgcagcatcagagatgtcctccgctggtacgccaggggtcttcgacttcgacgtgctcgttacggaacgagcacgctctcttcaaacgtcacgcattgaccaaacggtcaatggtagttgacgtgccgagaccggcacgtctaaccttgacggggggacggtgtaagggggttacacgcacaagtggctacagtcacttgtaactctgacagacacgacgtctgttagaggttcgaaagactttctcgaccttggtgtaaggtacaccaatggctacatacatttgggaccaccacgacgggtggttcatacacatttaggattcctattggctgaaagcagcatcttttagccaatgagcgacttgcatgttagcggaatcctgccaaccagcagattcctagtttagaatattacattcgggggaagtcaaagcataaatcacaaatattaataacagttctcatctttaccaaaacccgctacttagaatctttattttgtttaaagtatactcgtggatctcgagtatacttaactcaagtaaaagaaacctacgcttccttatacacgtgcgcacgcgtaaaagccgtagtagtaagccaacataggcccactacaacgacggcccatggctccttacgagatgtcgtcgcacgacacacctcgtcccccactgtattcagcttgtagatatttccacagcgcttggcctccatcaccgtcgcacttgtccttgctgaattgcgcgtcgacatccttctcggctagcttcgacaccgagatgaggctcccatcaccttctgggatgtacagaacatccgacaacgtgacggacgtcccgtccatcaacttcaatccgacggtgccctttgcaactgcgtcgatcttcgtgccattcgcgatcgtcatgcggactggcgtcttcagctcttcatggacacgaacttgtcccggacgctggtcatgtgccagctggcaccggagtccacaagtcactccgactttgccattgtgcccgtagccgtgaacacaaagtccgacgcttcctgcgcaacttgtccacgtccctcatcggccttcttcttgcggcactcttgctccttgtgcccgagcttcttgcagtagaaggacttcccggagaacccgcggttgcggaaatccttcttcgttgcgaatgccttctcccgagccgatgtcgaatccgccgagacttcaacaccagaaagaggttgaatcgcgtacgccaacgtcatgttcggcgttttctcgagtacggtgctgaccatccggtactcgtccgtataactgcccaccagcagcacgagttggcgagtctcggccagagctgcaccaatcatctccatttgcagcaccagctccttgatccggtccacatgtgccacgaaccgcgtcccgggctccatcttgaagttgtgcaacttcttggtcacgacgagccgattcttgagagtgttccggttgaactgctcctcaagcaggcgccacgattcagcagcggttatcgctccacggatgtagacttggtatgtgagactcacgtccccagcgatcacaccaaggaccttcagatcgtcggtcttccattgttccgtggagcggtcacacagctggtcgaactctggcttgacgatgtcccttgcgcgacagtttcatccgcatgttgaacacccagtggaagtagttgtcttccacgagcttcacggtgtctgcgtagctggggctcataaccacttgagattatgcgggcgaggcttggtagtcgagtgttggttaggaaggaaatccgaaagtgaattagaatgagttagaacaaactaactatcatatccttgtctcctatgcttaaacatgattcgtaccaacacacacctcctacttccaagtattagaggctggggatcaaaaagtaaatgttgcagatcgtatccagaaaggcaacttcaacttgcctttctctcagccaatcagaagtgtcaaatcttggggctccgctaatcagatcccagtattccaccacgtgtaccacaattgcctaccatcggcaacaacttcacagcaagcacgtgcctcgatacggagacacacaactagactgcgaagtgtacgatcgcaacatctacgactgtttgtggagcactacctcacgctgtacctcgctaaacatgccgtacaggtataagtccgaagtgtgtcgtggatgtagtttcgtcccgaagtttttcatcaatctgatcctgtaatattattattattatttgcggattttatgttttgaatcgacagctgaccaactattgtgtgcgcacttggatcaactacagtcacacctctaaaaatgacaccaagttcgctcggtctaatacgctgtttcagttaaaaaaaaattgatcagataaagaaatggctacacttctaatggctacattttcatatgttaggtgcacagtacaagggctttctttacctggtacccctccagcattttcgtactcttgttttgtttcgtcttcacacagacagaacttaaccaataacggtaggcgcggtattgtctgttcctaccccttcttctcattggtattagcagaatcgcatcccctcaggttgtacgtgagtttcaatacagtgaggctatgggaatatttgttgtcccgatatcctgccaccatgcctgcagttttatcttttgcttggtatctactgcatagcccctagttgtctcgacatcataatattttagttttcgtaaaatatatatgtacgctgcgctgattgtaaaatactgtggctagcttatttatcagtatttacaagttgcagttactgcaaactctttgttccaacttagcatcccaaataaaatttctctcttcgctcgatttgttgtggcgggagtagtggtagcaatggcatacgtgggaggaggcagacaagtgattgagaaaaatatatgagtttggatctattactacggcgtccatttagagggttgaggcgccaacaatggcgaccatttagagaataaagaggtttttgatcagttatagaacacctatagtgaaatccatataatcccgtttgcagtcgaggaatcctaaccagataggaaacacatagtcagttagaggggttaatttagggggtgtcactgtatcatctcgaacatcgacaggtgcggatcttggccttgaaaaatggggtggcaggaaaaaacatggccgttgatacagcccatgttttctaaacgggttagggtaagggacatattaaaaacaagtaagaaatctcaaacatgttgaaacatggccaaacatgttcggcttgtgggacgggtgtcatggcctacaaacactatgcaattcctatgggctaaggtgatcttcggctgccaaaagtcgctttcccggcgctttaagccctctgaagaccgaccaagcgttgaggagggaataccatgactagccatggcactggggtgaagtttgcaagctcttcatgcctctcaaatgccgctggtgtcgatttcgctaggacgctcccgacagatttgggttcatttcaccccctctgactaaaaacatgggctctatcttttccgaaaatacatagggggcagggctgggggaatggtcagaattcgggcaaaacatggctgaaatcggcaaaatcgggtcgaaatctcagaaaaatggggagggggggggggggcacgcgccccctgaaaatccaccccttcgtctgttgccaaatattcctcactgcttctaagtaataaccccaaggtggaacgtaatttctcattaagaaaaaaaatgcatacagcagtcaagtcaacaattttaatgtggcggacatcaacagcggggtgtgaatcgaacgttgaagttgctgctgttcctcattctccaattcgccacggatcacgcaagcggagaagaagatggcggcggagctgccaactccagtcgctttcacggccgtgaggctcgtgttcctctccaggagctgtgcaaggcctgcacgctcaactcgatccgcctgctggaccgcatctgggacaatagtctgccggaaacagagccgtcaccggctgacttgggtcctggcaacggaggctcctggtcctgacgcaagtacctgcgcacagaccgccactaccaccggttccagttccgtcgcgccattgtggaagcggtcctgctcgagaacgccaaggacgcacaacgcgtggtcaagtggctctggcgcaagttccacggttgtattgtccccgcgcccgcagtccacatgaccgcaggccagggaggactgggcatcttgaagttcttcaagaagaacgagatcgctccacgtcgagatggaggaagagccatgagagacgaggtcgacgctgatcaaggtcacgtcgtgcgttggggacgtcgggacatggtgcatgctgctaacaataagcagtacaagaccgtctggtggctctacaagaacgttcaagctcctcgggcgatgaagagtgtgctaattaatgcagtccacaacggagacctcgtgctcatcgagtggctccgagacaagtaccgcacgcgtgggtttgacataaattctgagacggaagagtacgagctggaggagagagtcgcggttcgagtcgtggagccgcctcgcaaaagtgggtttggacgtgtgggggatttatcgggggagaatgtgggcgagttgctgcgaggagatcccgaggaattcatggagttcgcggtacggggaggccagcttgaagtcctggattggatggtcgagaatggttacgttagcaactggtgtttcctggcggctagaccagcggtggactcgaatcgcatggacatggtcaagttcctgatcaagaagaaactgttggaagctggtcgagcgttgaagttggcagctgaggcgtgcaaattggaaatggggagggaacttcatcgactgtactggaagaaaattgttgcgtcgcactattatccagtgcgagaatctctcgcggaagacgaccatgaccggctgtggatctcgtcagaaacgatgctgaaggcaattgggtggtgcggcagtttggaattcgtgcagtggctcgtccagactttcagcactgaagtcaacctgttcgatacgagcaaccttcacgcgtcggagaagaaaagactgagcctcgacacggtggcacgacgtggagacattgcgttggtcaagtatttgcacgagatatcggtggtgaggagtgcaagcacgagtcgtcagaccaagagagcaagaatttcgcgggaatctcgcttagcctgcacgactgacgcgatggatcaagccgcgtcttcgagccaccttgacgtggtgaaatggctgcatgccaatcggtccgagggctgtacgacgcgcgcgatggatttcgcggcaggaaatggacacttgcaggtggtgaagtggctgagtgctcatcgttcggagggatgcacggttaaggctatggatgtcgccgcgagcagggggcacttggatgttgtgaagtggttgcatcgcaatcagtcggaaggatgcacaacagcagccatggacagcgctgcaaccggcggccacctgaaagttgttgcgtggttgcatataaatcgaaccgaaggatgcacaaccaaagcgctggatggagcagcggaaaatgggcatttatccgtcgtcaaatggcttcataagcgcactaacgctcgttgcacgacaagagccatggactgtgctgccagcgaaggtcacctggaagtcgtcaagtggctccaccaaaatcgcgtgggacgctgcacaactgctgcgatggatggcgccgctcgaaacggcaaccttgatgtggttaaatggcttcacaagaaccgttcggaaggctgcaccactgcagccatggatgaggctaaaacgctcgagatcgtgcagtggttgcaagcaaatcgagtcgagggatgcatacccaaagcaatggatcaagcagcctcggatggtgatttcgaccgcgtgttgtttttgcattcggaaagtgtccaaggttgcacgggagaggcatttttccacacgcacaaaacgccactgttcatggggatgcgagaatgcgtctttgactccagccgacaacattcacgactggctcactgagtattatccggacgaggacgacaatgatattttttccgctgttgacggagaaacatgttcgtcttcttgcctagttcatcatctttttaattacagcagaatttcaccactggtagcgccgagttgttgaattttagttgggtctctctctacacgcctttgtgagcaaaccacgataacaaaaacatcatttctcaagaaaagaaccgcgtatttgtatttttcgtggccatcaacaactgttaacttgcattgcagtcttcaatctgtgtggccacgaaaggggttcgtgtattcacacttccaaaactggatagtgttccaaaagccattggcgaaggctcctaaatcctccgaacctagtgatcgccactgcttgttgggtgcagccttcgcaacgttgagaatgcagaaacaacgcaatcccaaagtccccaagccgaactgcgtgatccatcgcttcggttgtgcatccctcgctgcgtttttcgtgcaaccacttaacgacttcaaagtggccaaaacgtgccgcaaagtccattgcggccgtggtgcacccttctgtgcgatgatcatgtagccacttgacaacgctaagctctccactacgcgccgcgccgttcattgccctcgtagtacagccttcacttcggttctcctgtagccacttcacgatattaaggtgtccgttggccgcggcccgatccatagcgaaggtagaacagccttcagatctgttgttgtgcagccactccacaacattgaggtgcccattcttcgctgctccgtccatagcttttgttgaacagccttccgttcgaaattcatgtagccactgaaccatctcgatatggccgtggcttgctgcgctatccattgctttcgacgtacacccttcggttcgattcaagtgcagccactgcaccacacttaaatggttgcgtctggcggccctatccatcgcggcggacgtgcacgtcggaccgtcaccacgcatcgttgtttccgttgttgttggttcttcctccctctttcgctttcgcgtattagctccttggaacaggaactgcacgccgtgaagaaactgaacgatcgctagatgcccaaggcctgcggcctcgtcgataagggctcgctcatctgtcggccttcgtttgaatagatcgatgccctgctccatcgaaaatgtattaagcaaccactgcacagcctcgaggtgaccatttttaacggctgctagcatcgtccgatctgaaatccaatctgacacatttactgcgggagcatgtacatcgaggggtccagctagaggatagaatcgttgtgaccgcatttgttcccaatagcggtcgtagatgcttgaggcaatctccatacgaccatggctagcagccacgtccattactcgagccgcctctaccagtctattatcgagcaaccagttgaccatatccagtcgattcagcttgattgctccatcaattgcctcataagcgtgggccaccatgtctttatcaaactgccactccatcacatcgagatgtccagcagcggcagccatgccgagaacaaccgaagcacgaggtcgttcatcgagacgatattgaccatttagccactcgagcaaaatcacgtccccattcttcacggccgctataaacacgataagaatggtgcggcgtactgacgcgtggtgatacagccaccaaatcaatccattttgcctgttcttagcagcatgaaccatgtcgttcccaccccagcgcacccaattccttgcgtttgggcccgatggggcgatccctcgagcatccagcacctctctgttctctggaggtccccgtgatcgagaagaaaccgcaaaagcacgatgttcccttcactcgcagcgactgtaacaactcgttcaggtaccacgcagtcgtggaaatggtcgaataaccaccgaaagacgtccataccagcgtggtgcgtcacggcctctatcatggcaagttggaactgggaaaagttgtagtgacgatcggtgcgtagatactttctcctggaccattcgcctccatttcctggacctaatgctgcaggggacggcgcactttcggggctgcaactgctccagatccgatcaagcaaagggacggagttgaggctgcaggcacgacttagtgccatctcgaccgaagagtccaggaatgcggacgtggcttgcacaacgtgagtcaattcatcgaacgccggcgtggagcggaacagcagcgctacggccagcagaggggcaggcgtcgacgattttgggtcttcacaaaatgagccgtagcaatttttggctcttcacaaaatcagtcctaataattgtgtatactcaaaatctggtttgggattagctcattctccaaaagagaagagaagagatggcggacgtcgagccgttgctggtggtgcagctcctgttccagtcgaagcacgggttcacagacctctcgcacgtggtgtctgtgagaaaacaaggtgcagttcggtgcccggagccaggcacatctgaatactatcctccgccttccgctcggctgcgagtcacagatgaacactgaaggtttgtatgcaggcgaaggctgttggtggacagcgaccgctacgttgtaggatgaattgactttgcttcattatagatttacagtgcttttgtatactgaatacagtttgcggagcggcgtgtgtgctggtgcggatcgagctctgctcactcttgattttggcagctctgcgagcactgccagagctcgatccccagacacacgctgccctgtcgtggcatcttgcgcccggcacgtacagtgtttagacatttcctttattgctcttactgttagctacagcttacgtgtgctttgcctacaatggcacctacactgagaagtagtctacagcctgagagcctggtgacacaacctgtgtcatctcagtgtcagctgtctcgctgttcctggactcgtctgtggagctgcctgtccacaaggcctgcaggttccagtcgatccggctgctggaccgaatttatgccagcgctgcagatttgatgcgacacaattcccgttacggaatctgggacgtgctatcgcagatatctcttcactctttcgttgattgaggcagtgggttttaacaacttggagatggtcaagtggttgtcggccagattccagacgtgtagcatcacgagtgacgtggtggccaaagctgcggggatgggctcaactcaaattcttcacttcttctacgacaatgacaacggagcagtaatggagcagctcctggcggctaaaccaaatagtttggtggggcattttgtggaatagggggggggggggtctcaatggcaagcgccatagccagtggccacagcgacgtcgtgtggtggctccaccgccacattcctaatgcaagatacgaccttacggcggctcttaaggcggcgatactggctcagaacatcctaatggctgagtggctgctcacgcgtggggccgctagcccccacgcgtgccaagcatttcgatagatatcgtgacacaaggaagacttgacatccagtggctggacgaacgtggcgaacttgatggcgttcagggcttaatagtgaaagctgcggagcatggatgtctccatattgtacgctggctgattgatcgcgatgctgcgaggagcggcattttcacacacctcacggatattggaggcgaagctagtcttgctatcaatgcagcggcagtgaacggtcatttggaagttgcgcagtatctatacgtacgcacgaaggccccggagaacgatctacagcatcggttacaaattttggagcagaggaagcaacgacgcaccttgtggacgcatctcggacctaacagcacagctggccgcgtatcggggaggataatggtgaaagcaacggaaaacggcttcctggatgtcgtgcagtggctgaatgcgatttcggatgttgcagtcatcagcaacatatttggctattggtacgcagacacgacagagctttttgtacttatgcaatggatggggccgcatttggcgggcatctggatgtgataaagtatttgcacgaactgcagcgttcttttgacgatgacactagaaaacgcaagcgagatgaaacaatcaagagatccagaccggattgcagcgaagcagcaatggatggtgcggtgcggctgtcgctggctatttggacgtggtgcagtggctgcatcacaaccggcgcgaaggctgtacaacttttgcaatggatttcgccgccacatttggtctcctaaatatggttcggtggctgcatgaacatcggtctaaagggtgcagtactcaagcaatggacggagccgcaacgaatggacacttggaagttgtgcagtgactgcacaacaattccagctcaggctgtacaacgaaagccatggatgaagccgcagcgaatggacatttggaggtggtgcgttggctgcacgatcatcgtaaggagggatgcacgactcgtgcgatggatggagctgctgaacacggcgctttgagcgtcgtcaaatggctccatcgcaatcggactgaaggatgtcgatggacaaagcggcagaaaaaggtcacctgcatattgtgcagtggcttcactctcaccggtcagaaggatgttctcccgccaatataaacttctaaatgagagggcaaaatccctacaagccacaatacctggttattcatgtcgccgcgagcagtgggcacttggatgtcgtgaagtggttgcatcgcaatcggtcggaagggtgcacgacagcaaccatggacggcgctgcgaccggcggccacctgaaatgtgtcgcgtggttgcatacaaaccgtaccgaaggatgcataacccaagcactggatgaagcaatgtttctacagctttgttgtgccgtcacagcactgttgtgtgcagttcacgcgttctccagtgccacgaatatacaacatttggcgtgtgcgggacgtcctccgcaggaagatgaagtttgcaatggatgctgtggacgagggggtcgcaaaccccttcaaggttggtacattgagtggtgtgccgaagcttggcggccaagaccatcgaaaactgttggctgcactcgctacatattgcagtaaatcagtgcatttgctgtttgcatgtgacgagtcaaacctttaattctcagtatacctttttctttcgatgcatatcaggcgttccttatcgacgcactttactagtactactgctaccgagtgggacctcgtgaatggaaatatgcgtgcaacgaaggtaaaacgatcaagccatctgcaccaaagcagtacagtaatctgcccaagtaaggaacgcctgatatatataaagacgcagaatatataaattgatgttaagttgagtatacttttccaatgtactgatttagttatttcaaaatgaactgaggagcagctttacctgcgagtccggaatgattccaacagtggcgtatggtcgaagcactaacctttgaccagacatcctcgcaccacaacagcgctgtcatctggtcgacctcgtagggattatctagcccttcaccacgccggtcgcatcattttaagtgaggcggagacgcttggacggtgtggacttcatgggtggagtgggacttgtggggcgaggtgcaaaagtaaaagtgcgagtctaccactacggtacatgtagtttgaagtctagtaagatcgcttaatgcgcgccatttttcaaacgagggtggagagctgatgattggcactagatttttcaccttagtacctcagtaccttgcagtaccttgcacatccccctatcgccacatcgactggaaaataatattaaatatgtgaggctattagttgtacacccgttccttattcgggcagaattctgtagtagtactccgcaagcactactaatgtatttttcacgcgatgttaccccttggtctcgacaacggcacgaggaggaagtcccagcgccctcccgagtttgctacttcactacgtcaggttgacaacaggctctagcctgacggatcaagcttgaatatatctttaagcgcgaagacggtgtccctcgtccctacgtagtgcagcacttcccaccccatgttggggcaatcgttggctttgttgaaatagcagagattctcgtaggtgacaccgttgcttccgcagaccgctttatggccattgttaatggcgcactggtaggggcattctgcgaagactccggcgatcaggagcgaggcgaggacggagaacttcatggcttcaggcttcgggtgtgtggtgggaggtcttccgtataggaggcagtataactgtggcctgttgcgtaaatagcaaagtgagtaggacgagggctattcccccgctgagccggcagaggatattagtacagcacagcgaaaaccgatatcttgatttttgtatatgatcatggggtttgcttcgctgcgctgcgcaaaggcagtcgctgcgctcctgcgataaaaagattctctcacctggcgagtacagtggtcggctcgctggaatgcttggcgctgggcccgcctccgcagataccgcgcggccctgcttcgcgggcggggtgccgcacgggtctgctatggctacgcgacctcgcaagttgtgagtcgcaaccgctcgcctctgttggtcctttctctggcccatgctgcactaacggaaattaccgaataataccccgggcactatttattagtaccctcccgttttcaaactaattctgataaattacgtatattatacagtattccatgcataaatatgctttcgacaataagcccacaaaattatacttgatatttgtattgaagtaaccgtgtaaccctgggctacgcagtgggttacgttttagagggtactatacgggtaaggggcattatttgggaatttacgttagctaaaatggctaccacctcgagcaatccgccgccgctgctggccgtgactctgctcttccgctcgaagcccgcgttctccgacctccatcacgtcgtcgatgccgtttctctgttcctcgactcgtccgtcgagctgccgctgcacgcggcctgcaagctggcgtctacgaagctgctgagtcgactatggggcagcagtgaagtttacacggacggagacagcgctactattgctgacgactcgtggacactccgcaagtacatccgcagtgaccgacactaccgccagtaccagttcgcactgtcactaacagaagctgttcgactcaaggacatgaagatggttcggtggcttgcggccagatttgagggctgcgaagtgaagaagagcgtggtcgttgaagccgctaaagcggggtgcttagacgcgttgacgttcttctacgggagggacaacacctcggctgacccgagtattcgggctcgtggggtcggattcggcgtcgagtggacgggggagcacatgaccgccgcagtcgaacagggccacgggagtgtggcgtggtggcttggaacacacttcccccgggctgaagatatgagcagagccttgaatgctgcggtttgtaacggggacattgcgatggccgagtggctgctggctcgaggggcgacgtggactcgaagcgactcggagctccaaccagctcaccatctagcagctaaaggtcgagtagacgtcttgcagtggttggacagacctagacaactcgagggggtcgttggcctcgtggtggtagctgcaaaagctggtcaactgcacgttgtgcgctggctgattgatcgagatacggccatccaggaagcgagcaaaaagctctatctgacggcacttggtagggaagtaagcctttcgatccatatcgccgcagtcagtggaagtatccgcacggcaaagtacgttcgagctcgcgcgaagtatccgacgaacagccttcaacgcgcaacgcaaacgctggagcagaagcggcagctcgagattttctcacgtaaattcaggggctcagtagaagctgcagctgtgtcggggaagacgatgacgcttgcggcgaggaatgggcatttggaggttgtcaagtggctctatgacgagtatggcaaggacccggacacgaatctgttcgactggagcgagccgaactacttgtatccctccgtgtacactgtcgccatggacgcagctgctcaatgcggccacttggaaatagttcagtacctgcaccaactcttccaatccattgacgcagagagcagcaagaagcggaaacgagacgaagtgcccccgcagcctacaagatgtactcaccgagcaatgaatggcgccgccgcgaacggccatttggctgtcgttgaatggcttcatcacaaccgaacggagggctgcacgactgatgcgatggattcagctgctgcaggtgggcacttggaggttgtgaaatggctccacaagtaccgatctgaggggtgcaccacggcagcgatcgacggcgctgcagcgcaaggacatctggaagttgtgcagtggcttcatgagaacactcgtgttggttgcacaacaaacgcaatggatagagcagctactaatggccacctcgatgttgtgaaatggcttcacacacatcggagggaaggatgcacaaccacagcaatggatcgcgccgccatacaaggccatttgaacgtagttaaatggctacaccgcaaccggacggaaggctgcacgacagccgcagttgataacatcgccgattgcggcaacttgcgcatgcttcagtggcttcaaagccaccgtaccgagggagggacagaggaggcgttatcgcttgccgtggtcgagaaccactttgaagtgttcctctttttgagctcgcaataccggatgcggtgcactgataaccagccaacgctggcgtacgaacatttccgccaggagattcaggactggatcattgaacactaccctgaatttcgaggaaccattccggaaaatgacgaataactcgtttttacttctacttcacggaactcttagccaattattagccgaacctgaatagaaaaaaatgctcacaggtcgaagacctgtgaacattggccccggcaaaaaacttgtaactttccaaaaccgggtaccaaaccgggtctctctttcttaattgtaatatttaagctaatatctggtatccgccgataactgctaagatttatgtacattacttaccaaaggttattgtgctttgcaatgattttggcaatatgaggcgagatttgctgtatttatagcgaccacctgctagatttacgataaatcaaggtgcatactcgggtggaggcctagaattacgctaaaagtgccacaattgcacttttgaaagtgcaattgtggctgtgcagctgcaattctgtcggctttatccacaagcacctagacacacggcaattatgcataagaagttggatgtgctggggatcatggacggtggtgtactgggccaatgcatggctgctgacaggctctcccaagtcgatatatttgtatatatgaggaggtggatttatgcataattctagcaggtcgtgtatcttttttcacacatatttaggcgcaggctttgccatatttagcgtctaaaatggtgggcaaaatcattgcaaagcacaataatactaatcgtttattattgaccaaaacctgcattcaaacacttacggacgctctagtacactatgagagcgtcatggcttcgctgaatgcgtatcaatttgcgccataatcgaccaaggttagctgaagatgaacgacatgacttgtctagctgcaggctgcatttttttacatgtcaatttgctcaatacccaatcactcttagccgaagatgcccaacctcgtgtctgtcgccaaaccaatcagctcaactcgacagtgacacgagcatcgttcgtttgaataagacttttttccctccgttgaagcacacacttccaaggaactggcccattagcgtatatctcattccgcaatttatctcccaagccctcaagttaaaagtttgtttgtttgttttgtttttgaattgaggatcgttattgtcacttagctaacatcctcaagttaaatggtcaagatcagcgcaccatgcgtctctccttcgttccgcaactgtagctctctcgtctggtcgttagcacacaacatagtacgaaaatgatcacagtataccttacctgcaaaatgaatgaaatagctctctcgttgctggcgccaacgcagccattggacgctgaccagggtgttatgtcaccgatggcctcatcagaccaggcaacatcaagtataaagaagagcggggcttgcctcacaaaggtttggctgaaacatcatttccgtatcgatacacttcgatgtgcgcaactatttgttcaactacgcattctcgggcagatgctgcggctgcgaagcaggcgcagtagatgcccacgttagagtcaactatataataaagagttgggctggtagtgccttttttaaggattaaaaacaatacaactttgggatttactcaattattaatcgttatcatcgtccatgaaactattcgtcgacctgtgtaccctcccggagcaacgctccgggttgcctatgttttagttgctgttcagtcgagcctgtaagcattactaagtacctaccacccgggctttacctcgccagcaacagctatgaagctgtctcattcgtgcccccacattttctcgaagataaaatcataaaagcccgggtattcccggactttggagttggaagtggcctcttggctcatcctctcattccggaccagatggaggaacatcgtggcttcaaacgcgccgtgcagcgcggcattgtcaatagctgcagctgagcaatccccggggcgattcgcatgcagccactccatgactcgaatgtggtcgccggcggcagctccaatcatagcgtcctgcgtacagccctcgcttcggtgccgatgaaggaacttcacaacgtcaagtttaccgccttctgcggccaaatccatagccgcttccgtgcagccttcactgcggttttcatggagccactttataacgttcaaatggccgctctcagccgcgaaatccattgcgtcgtttgtgcagccctcggacctattatggtgcaaccacttgaccacatggagatgccccatagctgctgcggcgtccatcgctagtgtagtgcatcctaccgttgtgtgctcatgtagccacttcacaacgtctagatggccaaacccggccgccgcagccatggcattcttggtacaaccttcagtccgatgagcatgtagccactgcaccatctcgatgtggccactcttcgccgcgcaatccatcgcaccggacgtgcagccctcagttcgattctcgtggagccacttgacgacttccaggtgattgttttctgccgctgcatcaatcgcctccgtggtgcattcaatgccatggcgcctaggtgccgtcccgaacatcatctctgtcatgtctccgctgtacttttctttctctccctagcgaactcgatctccagcgaaggtgcaacttggtgcaagtacttcacgacggctaagtgtccattagcggcggcttcgtccatcgcatgtatcgctctaccatctttaagggacggtcggaagagatcgatataatagttgcagctaaactcgaagcaaagccactgcaccacctccagaagccctttcctggcggcagttagcatcgtttggcgcgaaatcggcttcgcttggtggtctttgcccagttctttcgcgatctcggccttggtgtggctcagatgttcggattccagcttttcctcctcgtaatccattggccagtccacacgcgcgttgatgtacttggcaacttcgagatggccgttgatcgctgctgcatggatggccagactcgcctcccctccgactgaagtcacgtacggagggcgcgagggtttgttccttctaccgaaatacattccgctgtaagaatcctcttcatcgctatcttcctcgtcctcctctttatcccaatcgcactcaatgacccagcgtaccacatccaggtgtccgttctccgcggccttgaccaagactccagcaggaatgcggtcgaacgcggacccgcagcgcagaaatcgcagcatcctcagatgtccgttggccgctgctcccggtactccgcagattggaatgcgaatactctggaggagccatcggaccaattcctcgcccccattcgccactgcagccttcatcatggccgtatcatctctctcgaagtccgtatcgaattgatacagccacctcagccgcctgccgccgcgttcgccgtgtccttgcccccgaagaaaatgtctcgcttggtgagacgagtgtccacctcgctgtctcgctcgttatcggcgaaatactgtagaatgtccatcgcgccggctgctgcggcctcctccaccacctgcatacaaacgccgcgctccgggaagtgctcgaagatccactccaccatggacaggtcgatattcttacacccccccgtgagagacagccagaactggcgctccatgtaagactcctcctgcagcagcaggcggcggacagaccaggaagaatggtccgccagcgtctccagactgtcccatattcggttcagtggaggcagcgaccccaacttggacgccctctcgaggggcaactccacggaagtgtccaggaagactgacacggcgtccaccacgtgcggcagagagtcgaaaccaagcttgggaagagcggggccactgggaaaacaatatgggtactgtgtacccatagtcagaaaaggtaacatgtccaaggggtctggtgtatccataatcagaaaaaggataaagtatgtccggaccgaccgtctacatatattgtgcgtagcacagccgagcatgtaaattcaggtgtcgatcgggggtgcccatagcccctactttgcgtttaacgttgctgcttaagctcctcactaagtagggatgtacttcgtagcattatgacgaccctgcaccaagttttcaagaaaacgattctaatgtcgccaatcagacgaggaagtgcacacttgttcgatctgagacgctacagtactgtgtagagcagcatcgtgtcgtcgcgagacaaatgaatttgtgtaaacgcatctggcaaggtaatctccattcgtgaatgcatcgcgccatggccagaacggaatgtaatccttactttctttacgtgcccccgcgtccttacaacatggactcttattgtacttagtatcggactgagtagtgtaggagtttgtccagcgtgggcatgcgagaggtatcacccacccgcgcgtaaccacatttttcgtcggcgtttgcatgtgttgacgtcatacaagcccatgatctcgcgcaggttgcttagttgcgggatgccagaggttcgacgaccaacatggcgaacgtgtgagccattggctgtaatgtgaaaggccggaccggcaacgccaacggatgcaccgagcagccgccggaaaaaaagaaaacagaagcaagacatggtcgacaactgccgctcttggttctgctttctttttcgtgtagccaagcgagttgaagatctgtgcgcggtcgccgcaaaattgagcaattgcggcccgcaattgctcatcaagtgggcaccggtcatatcgagatccttgccgcgttgttgcttcaagctaagttattgcttcctctcaacagttatatatattctgattatgcttcaataacggtgtttaggtattaatgaacacgtttccgtcaacataatgacctctactcaatcattactgaagaatacttactcgggatcaagtcacaagtgggaccgactagcgaaataaaacggccagacttgaccccgttcaacgttacgcgtccatgtctgctcaatggcgatgccacgggaaccctgccgacctccccgcggctggaattccgtgccggtccaggtgtcaggcgtccgtcctcctcgacctccagagccttggcgatcacttccgaattgtagacgcgcgtgaaacgtagcggacaaatgaccaagcgcttcgccaatccgttcccgccgctggacctcaatggcacggcggccgacgagctggagcgactcgcgcgcatgttcgtgcaggaccacatcggcctctacgagcagttcctgcacgaagagaacagccgcgtggacccgcagcgctggaagttggtgagcgagcagggcgcgtgtcgggcgtacagcgagcggcgaggcagcatcgacggcagctcgagctccagcggagacgacgtgcctatacacgcggatacgcccagatcgaagctgcctacggtgttggtgacgggtactgtattgggggatctggaagacgccatctacgggtacgtctgccccacactggaccagatgcgcgtcaagacgtcgtacgtcaacgaccagctcgtcggcgcccacgtgctggccacgatcgtgccgcccacaccggaagacccctttcgagcggtgactgtcaagtggatggagaagggccagcgcatgcacgtccgcgccgtggtcaataaccgggatttcgtgtatatggagtcgactggggtggattacctccgtaatggcgagcgcgtgggttaccagctgatccactcggtgcagttcctcgagacgccgccgctggatcggtatattcgtggtaatatgtccatgtgcgcgtgctaccgacagaaggaccctttttcgaccgaagttttcatcaaaggataccttaacccagcgggaggactcatgcgctctatcgtggtgcattcggctgctgcggcgttgctgtccgtgtccaagaacgtctactgcgcgcagatgaagaagctcgtgtggacgatcagaaatcgtcgcctgaccattgttggagagacggcagccgagctagcgaaggtctcggataagtgtgtcacctgccaggcaccacccaagcagtccatcaagcttctgagtgggaagaaacggagacgcacatgcaagatctgctttcgctgcgtgtgtaaggagtgtcgcgagggtaggaagctgtgcttcatgctgccggatcaccgactcgtggagcaagacgtgtacttctgcaagcggtgcttgaacgacgctctatcatccaaggcacaggcggtagcgcgtgacgaggtcattatgagcggtgaagtgtacgagtggagcaacacctacggaagctcgtcgagcaacgagcccgtgctaatcgacgatctcaacgatcgttaaaactggcgaagattctggacgtacatgtaggaatgttataaagtgatggacaataacgataatgaaatgctgagcgtcactggcaggctagtgttaaattaacagcgtcgcggtgaagtgatccccgctcagcgtgccttgaagaagtgagggaacagatccagtcgaagctgatatgcactgcgtccgggaaaccgatctttctttcgacgcggcgaccaaagtttggtccaaaccgcctctaggagtatgaagccttaagactggatgattcgtgagacgacggcgtccacagtgctgagtgtgtccttcggagactaccgccgaccgaagttcggagagaagaggccgccttgcaatgttcaatccccctctgcgtccgcaatcgaatcaggctcggcctcacttctcgagttcctcggcagcaccaaaaaccatgaagttcccattgccacccgaaacgatgcccaagctgcagttgcctctccatgatcagcaacgcatcgagcgcctagcgtcggtgttcgtaaatgagaccgtcgaccagtacatggagcatctgcaggctgcgagggcgcagcgcaggccgcgggtctgcaagaagcgctggaagcagatcaagaagcgcggcaacatgaccgtctaccaggaccggaatgcaggcgagagcgtgaggcagaagatgagcttccgggcgttgctggagacgcctggggaattggtcaagacccacgttgtcatgggactcggacactgtgagggtctcatggaagatgccgtctacggggccatcgccccgactgaggagctcatgatggtcaagaccgcgtacgcttcggacggcgtcgtggactgtcgagttctatcttccattatcacgcccacactgatggatccactgcgcgcgctgcagatcaagtggtgcgtgaacggctcggcccccatgatcgtgtccagtatggtgcgcaagcgggacttcgtctacgtcgagtcttcgggcatcctcatgacccagtcatcggcttcaacttcctgcactcgctcgagtttgagggtgtgcccgacttgagccatctgggcctcgtgcgcgccaacctgagcatctgcagcctcttcagacagcgagaagagggcggcgtcgagctcttccttcaaggtttctgtgacccgctcggcgacatggctgcgagtgtagccatcttgaccacggcggaggccatcctgagctatgcgggcgtggtgcactgcaggcagatgaagaagctcaactgggtgctgagcaagaacgcggccgtcgtgtacgcgcaggagcccgaggtgtgctgtgtatgccacaagaaccagagcagcagcctcctgcccaagaagcactgccggatctgcaagggccgcgtgtgccactcgtgccggaagccgcaggagctctgcttcgtggagctgcactcgaggacggtgcgcaggtacaagctctcgttctgcaaggactgcgtcaacgcggcgctctaccacagagcgctggagatcgcgcacgacgagctcgtggaggagaaccccatgggcgcctacgaggtggaccaggagtccatctcatccatgtcgtccttccggtcctcgtcgcagtccgatctccgccagttcttcgccgcgtagttgccgtctaatgatgctgctatgctgctacgtatacatgtacataccgttacctacagtctaccgacgtgtacttggacaggcattccaagcagtcaagtaccttgcagacagcttcaactcggaccgatcagagagaagcaaggcatgcatggcgggcgttgaagtttgcgagcttagcagtgagccacaacatttatgatgacacatctgtaccggtatccgcgggtgcttggagatacatgtacatgtggtattgtgggggtttagttataatggggttgccaaaaaaggggccattttggagacgggcgaagtctttatgaagaagtttgtatggagtgattgatgatcgaggtaggaaagtactcattcccattttgtaccacccccattataactaaatatggtaggtaatcgaagcggcgctacgctgccatgatggagacacactggatggcgacagcagagggaggtgcagatcatgcacgcgcgcgggtcaggcgatcacggtagccgtgacgagctggcgatgcagcaacgctgactcagacctgtcaacgcccaaagtggagttgagacggagcttgggcttgggccgcacagagtctgcaacgactcgccgtcacggtggcgacaccggtattatagaggctcgacgttatcgtcctcaggatgggggcaacgcaccctcgccgaagccgccaccgcagactcggcggtactccccatcgccatctgggcatccgccgcctgacgtacagcggtgcccttctgcctggtttagcggagactttggtcgggtctcacgtagcgtggcactcccgcgttcacttggccttctggtggacgggcgggggcggcgcgcccgcgttaccggccaccaaagtgactgcattccccctgcattgttcatttcgacgctgtgttgaaggctccatgcggttcccgctgcctgccgacacgttcccgactctgtcgctgccgctggacgaccaggacgcgctcaagaacctggccacggccttcgtggacgacgcgctggtggagtaccacgcctttcggaacgcgccgctcaatggcgtggtggacgacagtcgctggaagctgctgaagaagcgggacggcctcacgtcctacttggaccgggagctgggcgaccccgcggccacgcgcaccgctgagcgcgagagcgtggggggtatgacgttctccaagaagctgcacggcgtgctgaccgtcgggacgatcgatggctcgctgcacgaccagatgtacggcatgcaccactgcagcatggagctcatgcgcatcaagtccgcgtacatggacgacaagatcgcggacggcaaggtcatctgcgagatcagccacgccacgcccgagagccccgtgagcgggctctacatcaagtggagcgtctcggacttcgcgcccgccatcctccgccagatcgtgcggccacgagactttgtctttctagatggtactggtatcatcaaagatcccgtcacgggcgaggagatcggctacagcatcatgcactcgctccagatccccggcatccacgagctcaaagagtatcagatcgtgagggctaccctatctatctgcgcgctgtttagagagaggtcctcgggggtggtcgaggtcttcatgaaaggcttcgtggactccatgggcgacatccacacgagcgtcgccatcccagccacagcagaggcgctcatgtcctaccgcaaaggcgcgtactgcggccagatgaagaagctcaactggctagtgaagaccaagaagacggtcatgctcgaccagctcagcggagcctgctcggtctgtcaacgcaccgtcaagaaatccgcagcgtgccagatctgcatgaaccaaacgtgccccgcctgcagcgtggtccagaagctggccttcctgtctccgtcgcggaagatcgtgaggaggaacatcccgttctgcatccgctgcatgcgcgtggctgcgcaggctgacgggctcgaagtggcctccgaggagctgcggcgacagaacccgctcgaatacttcgagatctcgtccagcgacagcgcgacgccagcctccccctccaactcgactctacccgacacccagcgagagttcttcggctgaaacacagggaagctacagtccaaaagttgccgtcaagggttcaacaggatgccaatttttatcagcgtaagtaaatgtattaacttgttaaccgaagcccattgctccaaccttactctgtagcctgttgttgccgcctaaagaacaggtttccaagagtacgaccacaatgatgaaagttggccccgctgaagaagtgcgatactttcgaatggagtttggccatccgaggagaggaagaacggcgagaacccgctggaaattcacgaccacggctgaaaaccagggctatgcattccttttcgacgtggatgcataccgatgcgcggcacagtacaggttgctgctcatgatgcgcgaacggagctcttgacagctgtggtggaaatcttgtgcccgaaaagcttcctggatgtctgtagtgtcgggaaaggagcttaccgcgcgcatgcagaagctggctggctgctgaagactgaatttttatcggcagattgatgaggagcgtccagttgcaaacttgttgttgattctatcgcacggaaggtgcagaatgaagcggctttggattccgtctccagtccttgtcgttattttgcgtcggagcttccgacgttgtatcacgccgtaaacggacgagttgaaggatttgtacatgtgtggatggatggatacatgcggctgtcgtgtcgtggcgatttcatctgtctcccgagcgctctggagtgggagcttcaaacacgcagggactcggtgtggggccacttcacgaagcgaaagcgcgacgctgaagatcttccacaacccaccagcggacagccacagtacattcaagcgagcaacgcagagattggtgcccgaaattcgcgtggattgacggaaccacgggaaaccgggccatctggggataggcacaacgtggcttggcgcgcattactcctttcgattcgtggcaggttcagctccactggagcctcctggtggctgctaggatgcgctttccgctgcctgtcgacacgttcccagcgctgaaggtgtccgaagaggacaagctggagatccgaaagctcgctgatagctacatccacgaagctctggagcagtacatggacttccgcatcgtcaacgggggtgagctgaacaaggagcgctggaaaccaatcaagacccgcaagggggtgacggcgtaccgagatttggggacgacggacttagcgtcgtctcgactcgcaccgaaggagaaagtcggctctggcgctgtgacagcctcgaccaagctgcagggcgtgctgacagtcggcacagtggacggcgagttcaacgacatggccttcggactgagcaacgccagcactgagatgctcaagatcaagtcgtcgtacaccaacgacaaaatcgcggacgccaaggtactagctgctgtcgtggagcccacgccgacggagcctgttcgcgggacgtacatcaagtggagcgtgtccaccggcgctccgttcatactgaggaaactcgttcgaccgcgggacttcgtgtacctggagtccatcggcatcctgcagaccgagtcgggcgagcgtatcggctacagtttgctgcattcgctgcagattccgacgatccgcgagctctcggggttccagatcgtgcgcgcgaacgcgtccatctgcgtgttgttccgacagaagtctccggggaagctcgagctctacgtgaagggcttcgtggacgccatgggcaacgtcagctcttgtttagcgctctccgcgactgcagacgcgctgctgtcgtacgggaaggtcgtgcattgcggacagatgaagaagctcaactggctgctcaagaccaagaagacggtgatactggaccgcaacagcagcgactgcgttgtgtgtaaggataccgcccaccgacccagatgctgcgacgtctgcttgaacaccgtatgcgctcgctgcagcgtcaccaagaggttgagcttcctgtcgccagcctcacgccgagtttctaagcgcagcgtgttgttctgcgtgtgctgcttgttggcagcattgaaagccgacgcgctggagatcgcagccgaggagctggtgcgtcaaaacccgttcgacctctacgaggcgtccacgagcacgccctcgtccagacttgtgtcgccgtcgagcaccacgccacctgacgccacctcggagtttttcggttgagctcatgagctgggctagggccgttatcgttcagtgttattgttggtctcagctcatagctcggccgtttccgtccccccccccttcattgttggtaagcagaggcagctagcgacgatgccgtcgtcggaaggtgacgctggcgatgtgctggaagttggagaccatgacgacggcaacagcagctcctcgttctcgtcctacgactcggaggagttcggtctcgtagcgcgcaagggcttcgcgcgcatgtacgtgctgtctcgtaatatggcgtctaaggacgagacggaggccaagggtgagtcctcttccaagcgcgggggctggaacctgctgtatgccagtggacagcactatttccgcggcccgatcgagctgccggaggacattcaagtgcgtgacgaagcggagggagacaacagtcgacctgccaccttctttgagagcatcacgcggcaacatgaaggaggcgtggagcttgccgacattccgaggcttctgccgttgcttcacgcgcaacaggactcactcactgcagtcgacgacgtggtggagctgagctcgggacagcgagacgccgtgtaccagatgctggaggtgggcgagttcttcgtggaggagctggccaagccccgcacgaccgcgagactggagctcggcgcgcaggagctgccatggctcgctgaagcgacggagaagaataatccggccttcttcgagctgcagacccacccgaacaccaacaacgatcttgcaatcgctggcgttcggctcgtggtgatgaagctcgtggtgcggggggtgctgctcgacatcatttactctcgagactcgtacttcgccacgttgagggagaacgcagaggagattgcgctcgaggacacgttcgtgcccaatgttgcgtgcgccggtccgtgctacttggtgcggcgatacagcgacgaggacctcaagcagttgttgctgtggtgccccctcccgaaggaagctccgtcgtccttacagctgaaggcgagcagtcctaacgcaaaatctcgtcgagctcttgcagccaacgacacgcaactctactgtctgatggccaagcgcccgcagacgagaacgaacgccaagaagaagaggacgacgcgagagaaggagttgaagaggaacgaggaggatggagacgccgacgatgaatcgggtgacgtcgtggacgacgcggtggtgttccagttcaaccagttcgtctaccacggcagcgcgcaggtccccactgctatgatggacgaccctggagctctcgctcgacgcgggttccctctcctccgcgctcaagccagtgatcttgcctttgctggagtgtatgaggagattctgggccctggaggcgagcatgaagccgagttccctcgcacccagttcctcagccgcttcgccacagttcatcgtcggttcaaggatgaagtcggctccgtgttgctcgatctcctggtcggagctcagaagtgggtcaaggagttcatgaacgaagttccagccgcgagcggtgggaacgagctcatcgccacgcacttggcgcgttggctcgaggtggaggacggctccgagtccttcttcgagctcgagctcgcgcgcggctcagtctgcccttttgccaagactatagacgaagaccacgcgtacggagagcagcagcctttggacttgctgatctggaaggggatcgtacacgacgcgctgctcggcgtcatctatcggcgtggcagcttcttcatgacgctgcgtccggttgccgagtcttcggacgttgtgagcgacggcgtgctggacgacgatgcatctgctcagctcttcgccggcgtgcctccgcacctcaacaaagggcgaggatatctcgtccgtagactgccaagcacagcaggaacgccggcgtggctggctggtgccaagctgttgctctggcagaccagtcacagtctcgaccgagaggaacaggacgaggctcagatccaagcgagcgagtgcaagacgccgtgcaaggactggttcgaggacgcggacgccaaaggtgatgccaaggcccagtccaagccccacgctcttcgtccagtggagcttgcaggtgacaaaggctccagcgagacggcgagtgcactgcctaaggaggacaaggtggcgcgccctcaccacctctcgcgtctctcgaccagtgaagcgctgctagctttacaagccaaggcacaggcggcactgcaacctgtgccctgggacctacgcacggggcgtccgctctagtgacagatagtctacggaggctagagcctcgataagccatgaaacacagcatgaagcttactagttgctttattgagttgtcgtatcgcctgtgaatctgcctgtaggacgcagtagcagtgttggtagtcgttgtagaacttgcctaacgtccagcatcatgtcgtcgtgagtaaggagctctctcgcactcagccccgacacggctgctaggatctttgagacgtcctgctcgggcatcgacgcgtctgcagcgtggagactcgctcgaagatcatgcagcgagaccatgagcgctcctgcgtctccaagtggctcattgatctccaattctgtggcattaggctgcactttccgtcggatgtggagctgcacgtgctgccggaaggtcaagagatcgtcgagacgctgcatcttcagacactcggcgaattggcacttaacctgcggttgaaccgaccgataaatcgcgtccgacttcgtcttggagctctggttcgtgctcacgtgcgggtggtgtgccaacaacgctgcgtagtcgacctgcgggtgaccacgtaggtcgaggagtagcgctcgatgcagttgactcaacgctgcgtcggatttccacgggaatgtcagccgtagagtccgtactacgtctgcgagcgagactcgacctggaggtagaacggcgtcggccacttcactactacctggtgttgtattggagaagtgccggtcgtggtcaacgactgagagggcttcgtgtagtctcgcgagctctcgagtttgatccccacgcgcttcgaccgggagttcctgattgaatacgaggtggaagagtcgacaagcactcgactgcgagctgaactgctccaagccagccaggaaattgtacacgagctcgactcgatccgcgcggttgtctcttgaccgctgtaggaaccgttcgagtgccatagtaagtagcgacgacccagaagcagacgccaacgcagctttcgtgccgtcgtttgtaccggagctgaacgacgcgcgcgtgctggagtgccggtgctgcgccacgcggagctgctcgtcgaattggtcccagacctgagcaagaagctgctcgatcctcacgcgcgggatgaagaggtggcgcacaaagccgtcgtgttgcaagtagctcggcacgtcttgacccattcctcgacccgctagaaaatcgactcgcgctttggtgaaagctgcggacgacgtcaccagcttatcaggagttaggtcgttgagcgcgagcagctctgccggttctgtgaggaacaccagtggactctgcgcgtctccttcagcttctctcttggcagctaacagagcgaactgctgctgctgaacttgtctcaagcgctgcgtgatcgtcccagcagtagcctcaataccctcagggatcgttggtgcactcgcgatacctgttagcaactccgagagctcaaattcgaggccaaaaccatccaaacctgccacgaacgcgtgatttaaggcgatatgcttgctctcttcgctgtcttggcttgatttggaggtgttggtaggagcaggagaccctgatgcagcagttagggccgtggaaagctcctgcagctcgcgacttagtagtacgatggtgttcttgtccgcggcgacgtgctctccattcccctgctcctccagcgccgccaccgtcttcttgagctctgcaagttcgtcacaagcgtgataataccgcgctgtaaccttctgcagcgccctagcgtcttccagagagcgctcgtggccagctcgtagactttcatcgtgtcgacggacgctgctagctagcgccaacgtggatcgttggacctctgccagcttattctccgcttggatgaccttgcccttctcagccttcagcgccgcattgaggcgagcgttctcagccgcactcgcagccagcatcgcctgagtctctgcgagtcggcgcttaagcgtcaacaaacgcgccttcgcttccgcactgctggcgctcagctgtcgaagacaatgcgtctccacactctgcagtcgcgtgttgagccccggcaccatcaaactccgagcatacagcgcctccaccgcgtgttcgtactcgtcacggatacgcatcaacaccggcgcgtacacgttgaagccgtcgatgagtctgttgagtgcctcacgaacgacctgaagtctccgtagactgggcgttgacgccttattgggggtcgaagactctcgatcattctctccgtccagctcgacctggaggaaggtcagtagctcctgcagtagagctggtcgagttcgactgtcgtccacgagccgcgtccgggtgtggagcttgcgcacttttggtgagatgggcgagaacgggtcgaggtcgatggttgagtccgtttggcctcgcttgttggggctcccaggcgcgaacgtaagcggccatgacgcgacttcagcggctcgtggcggatgatggtgatgtggaggcttgtcgaggaatttgttggctgttgaaggagatctcggctcacgggcacttgtcctaggagactcgttggttatcggcggcagggaggagctggtgcttgttgttgtgcctttaggttgtgctgggcgtcgaggtagcggactggcaaggccgatggcaacgaaatccatgattggggatggcggctaaaaggaggaatcccattcaggcgagcggtcgtgccgaacaaccgttactcagctttcctgctttcatccaagctgcggaagacatggggaacacgctcaacctcgagtgctcggatccgatagtgagcgatgacccgttgctcaaggtgcgcgcagcgcagctttactctgctttgttgtgggataacatgactgacagttcttcggacgaatgagtaggaataccgagcaggtaggttggagagctttatgggaccatttcagtgacgaaattaacccaactcttctttatgggcgtgttaatgatctttgatagcaaccatcgacgacttcatggaggccaaagagagcttcgaccacctgcaagcagctctgggggacaagatgacggtcaccccggaggagttcgacgaggtcttttcgctcatctgtcaggatccacaggagcacttcgcgctgttcgactcatgggaagtcggcaaggtggtgtgttgcgcgctcgtccattgaatagaggtctgatacttcgtcgagatctcatcagcatcttgtacactgttgcttgcaggtggacgtgatggaggtcttcgcggtgatcatcgtgtattgcgacgcgatgatggaggagaaggtgcctctgctcttcgatctcttcgactttgaccactccaaggagatgtcacaagacgagctggtgctgttgatgctgtgcacaacccgaggactgtgtaaggtggttgggatgcctcgacctgccaccgacagtctggaagctctggctactgacgcttttgcccacatcgacgctgatcgcagtggccagatctcactcgaggagttttccgactgggtcctgcacgaacgcagcgccatggcgtacctggcaaagttcgccaacacgcgcgtgatctacgagaaccaggtccagtacgacctgatgatcaaggaggtctgtacagccttcatgaacttcgctgaagtggatcaatccgacgatgccaaggacaaagaaggccaacaacctttgctgtgctccgaggacttgtgtgaggaaatgatccagcgctattgccccgcaaccgagaagcacgagatcgccttcttgctgcgcacaatgaagaccatcatgaacaaaaggaagggtgaggccaaccagccagaggatagcgccgacaaggcgcacaccatgatctcgatggacgcgttcttcctcgttgtctctccgtacgccgcattcctcgccgctgacgacgacggagagcactcaatcaacatcaaggagcttaggatcctcatctggctgcttcgaggatccgagccgagccaagcggtggtcgacagcttcatgaagtcgctggatgacaaccgcgacggcttcctcagcgctatggagtgggtctcgtacgcgcttgaggccaacaaagagaccggcagtcagtcgtttgcgaaccagatccacctgctctttgccaccgccgacctgaacggagacgctgtgctgtcgttatcggagctggaaatcggactgagatccattttcgctgatcacttagatcgtgtagagccggcgcctaaaccagaagccgctgcatcgcccgagtcagcgtgggaagagctcacagccccggagcgcgtggagagacgacgcaagtcgcagttttcctcgattaccagtctcgtcgcggagctggccaaggaaatcatgcaggagctcgacgccaacgagtcgcagcgtatcgaatggtacgagttccggcagcacctcgactacctcgagcaacgtgtgatggagatgaaagcctacatccaagagcacgtattagactcggaagactgaatatctcgagataagttggcactatgcttgcgctcttcgagcacaaggcagctcaagagcaagatagagactataggtaatgaagaagttgatataaatggtttttgttgctcctcatcgttgacttaccagcctacgacgcctccagtcctgtcttgctcgacttaatggccaagccataacgcacttaagcccagatcttgagtagcgtgtcccagctgcctgtgcacagtgcctggccggccgggttgacgccgaggcaagatacacggttctcgtgtccggcgagctgatagatgtgtgagcccgtggtgctgagcacgtcccagcagtagcagttgtagtcgtcgtagccggcgaagaggaagcggcccgacttggagaagctcacggacgtgatgccgcacaggatcttgtcgttgctgaagttgttgagctcgccgtacgcgcggaggtcgaagaggcggcagctcgagtcgtccgagcccgtgcccagcgcgttgccactcgggaagaagtcgaccgagttgatgtcggactcgtggccctggaacgtgtgcgtggtcttgcccgtgcggatatcccagaccttggccgtggagtcgcacgagcccgagatgaacatgctcgggttgtgcgggttgatgctcacggacatgacgtcgcccgagtgttcgcggaaggtggtcttgacctccccgctctcgacgtcccagaggatgcagttggagtcgccggagctcgtgacgatgctggcctcgtcgatgaacctgcagcagctgaggtagccgtcgtgggccgccagctccttggtggcgcgcatgacctgcgcctgcgacaggtggaagatgctgcagaggttatcgagccccccgcaggccaccatgttgcgctgcttctgctcgaaggcgcaggtcatgacccagctcgagcgcagcgggatggcctggatcttgttggtcgtctgcgcgttccagacgatgagcttgccgtcctgcgacgccgacacgaggctcgagctgtcgccgccccactgcatggcgtagatcttgccgaagtggcccttgagcagcctgcggcacttgggcggggccggaatcggcttggcgccggcgctggcgttggcgctctggaagccgccgtcggccttgacctcgcgcgtcttctcgatcgtctccttgaggctctcgcacttcttcttgagctcggcggcgtcggccatggctgagtgataggagaggggaggactttaaattagcgtttgctggctacaggcgtcgggtgtcggcgcggggcggctcgatgcgtagctgagacgcaggcgcagctcggggcggagtttggggcgcgacagagctcggggaggcgcggggcggggaatggcgcgacgcagcgggcgcacttccagcacagcccccggtgactgttggaggtatttataactgctgcgacgcttgggtcgagaatatcttccatggaatgcgcgcctgcgattgggcgggcgccgggtgtgggacgagcgcggattggaggaaatggaagagcaacaatagcggtacagtgtgcgtcgcactgggcagcgtcggtcgattcgcttgctatgcttgtggacacccgaatacatgtagtgcatcgaattgagttgtacgcctcatgtgcttttatagggatacatccaagtgcacattgcacttattggtgtgagcgcgttcaatagggctccttactgcagtacatgtagagatcaataacggaggaggatcagacttatctatttaactttactgttacaagatgtctggaatttcctaagtcaggatatcaacgccggtgtcgtcgtgcgatcccttgcggtggtgcctcttgaagcggtcgcgccaacattcctaaacagaggagcaggcgcgtgccttgtattttggtgtgtgggtgccaacgttcgcgtcgcgccagtgccctcaattgctgcagcccagtcttccaaaattcttgtttacttccttgctgcgtaacttgcccctgctgatgggtcacccggtttctttggatccacaggaccgttatacaaatggaactgagtatccaccacactcggttccactcgatcacgtacgcctccacttcgtctgtgaaggttgcttgcagcctagcctgcatcaccgacgacagtttcggcggcgatcttgacatacaattcgccttgaacttagccagatcatgctgttggcagcgttgcccagtccagtgcgttactagcgcttcccagcacgtattcgcacaaggacattcccaaaagatgtgagctaaggtttccttgtgtcctttgcagctcgccagcttcctgcagctgttgtcagtttgccgtccgtcaaagtatagatttagctgtgagaccgccaatctgtagttgacccaggcttgatactctgtgatcgcgtttcggtgcctccacaattggttcggggtttgctgcaaggcctgccacagctcgtcgtcgtgttttgcccttgcctcgagtctgttgacgactttggtcagcgccggagcgagctctccttttgctcgtgcaaacgaaagtttcttcaacgcttggtctattttgtggctcgacactttgggtggtatggaccacggaaacgcatgcaagctggggtgtgctttgaatactatcttgttctctgcgcttccaatctggggaacgtggccagatccttttcatagtcctttggaaccgctgtgtcacctgatatttgccaatggagcccgttcctggcttgttccatcacgatgcggcagggttctgcgtcagcctccacctgaggtttcccaattatttgaccacgctcttctgccatccagttgtactgatgttctagccgtggcggctgtcgtagatgtgctgctttgctcacttgaattcgccccccgatttcaagtgctggagatcccaagagtatagccagcgctcacctgcttagcttcgggtaggtatgatgcttgctttccgcctctggcgagggaattagcatcgagtaggaggtcaggccagtccgccgaatttccagctcggccagaggacacacgagtatcctaggatatttcttacgtgttagcatgtttccgttgctttctcggatccatgggttttccgtccacaggtatgttggccagaactccacagtttcttccggccacacccatgtctgaggctgaagagggtcatatagtcgtaattccaaagtatttccaaccctccatccgattgaacttcgcactaaagtgtccatctcggcctgtagacgttcttggattgcattctctgtgttcgagtcgggtttgagccttgcaccgatttgcgcttgcattcgcatcccggggactttaaaggccctgcatctggggttcggcgggttgtgtggggttatcactgcgaacccttcttcatcggatgctcggaaagcccacgagcgccacgccgagaaatatcggtcctggttttgagtgagccagagaatagcatgcttcatccgtaatgctttgattgccactgatatcgacgctaaccctacaccccctgccttttggggcgtgtataggagcctcggattcaatatatgacgactggggtcactcgatgtcgaatgtcgccagataaattgcttttggaggttcagtaattccttctctccccatttcggtaggtcaaacaccgccgctgtaaagagaatggctggcagcgcaatgacattcatgatggtcactctcagtgcaacactggtggctaaatgcgtcgcggtcgccagccttctccggatattgcgaattcgtactgcccaattgtggtgccctaagtctcccgttccaacgtagtaaccaagataccggattgtgtctccatgctggagaactggtatgccctcataggcctccaattcaatagccgtgttcaggaaaatcactttactctttgttggttgtacatgcagacccgataactggccaaaccgttcaataatttccatgactcgcggtaactgctgcgcctcccgcagaaacacagttgagtcgtaaatgccgaaaaaatatgggtgagcgtcggatcaccgggcaccggaaccccttgcaggtctgtatcttgcgtaatcgccagcgccaatatttccgccgccaaaataaacaacaagggtgctaaggggcatccttgcctgatgcccgtttgtaccgccgtagcttgagacaatagaccattaactagaaatatagctgtggtcgaatcatgcaatcgcctgatcatattcacaaacgcctcggagaaaccgaacctgagaagagcgagaaacaaaaattcccgcgccaccgtatcgtaggctttgcgaaaatccaaaagtaaaatgattctgctcgctaccgctgcgaggtctggttcgcctcgcgcggtggccagtatggccatcatcatcatgacagtcttcatcatctgtctgtcgtgcacaaatccctgttggatttctccaatcggtttgcctaagatcttttgcactctttgtgcgagagcttttgcaaaaaccttgtaacctgtttgtaagagcgagatagggcggtagtccatggcgtccgctgaatcacctttttttcgcaatgggataattagcccctctaggaaagacgccgggggttctccacctttcagcagctcatttctgtggtgtagtaccccgcggaagaagtgggcgcgccgggcgccggaggaagatggcgccgggacgcgagtgatggacttcgacgcggctgatggaacgcgacgcggattaatgggcgcgacgcagggccgagctcgacgggaaagtcggcgtgggtgatgggccgtgagacacggtgccagaatccagtgcgacgcgtaatcatccgacgggtcgaccagcgcacccggttctgcaaaacgcgccgaccctaaaccccgccgagcaaaacgggccgaccctaaaccccgccgacaaaacgcgccgaggtaagatcttgattgcgccacgcaaatcaggttgaaggacggcagtgcaagcacgacagaagtagggatagacacacaacgataggcttagcaagcagtagtacggagtagccagtagctagggcataggatagggtaaggactcagtcccgaaatttctctgaaccacaaagacctcccgtcttctccgaggttccaggggaaccaccaagcgccggcaagtagagccgcctcgatttcgcgccccccccccgtcgtttgctggttcgggtgctcaccccccccacagacccgtgctagaacaaaggcacgttaaacgtataccgtgtaggtgggcgcccgataatgcgctgcctaggcgaaggaccgcactggcctgataaccgccgtgcacaagacccccgtgtaggcccgataacgccacacaagccccaggaaacgccggcccgataacgccgcacgcccgacgggaacgctgaggaaacgccggcccgataacgccgcacgtccaaggctcgacgccctacgacaaggaacaagcgtcaacacaagaacccccaactccgtagcctgcgaagacttgggcctgtatttcgaagatacgctactccaacaaccgggaataatttgctcggcgcgaccgctatccagacgcgccgagtttgtgcgagatcgcattcgcgagatttctgcgagggcgctactccacatttccaatttcgactagcgctggtgctaataccgcttgagcgtcaattacgaaaccgttgtttaggccatcagggcccgccgccttgtgcctattcaaagctgagattgcgtccaacacgttattggctgcataagcttctcattatctttcgctgtcagacgtcgctctggtggaacgttgacgaacggtcgaattcgtggggtagttgcgaggccgggatcgttctatggctcctccctaatattggtttccattcagatgcaaacttgtctgcaatcgaggcatggggcaggaacggttccccattgatctgtcgaatctctgtaacagtttgaccttttcccagtcagaaattcgtttaaacttccatcgtatccgtttcgaagtccgctccatacgattgcccgctcgtatcatatgctcagctctttgatcttccatctttgcttcaatcaaatcgtttctcattaggagctgggcccgtgcttgggcatagagtttcgaggcatacctggtcgagcgctggcgctccctccgtcttaccgtctttttacactccacacactttgtcactgttcgatcccaatcttttacccctgtctccttccctacttcgtgaagaatcaattcctccatgagcgccatgcgagtctgttcaggctgggctgtttgaaatggatactgcatcttcctcactgcctgtgatctcattgtgccccacttactgtcttttaacagaagtcgtaccatttgatggtccgaatagagaggtggttcttcaaccgagacccattgcaccactgtcgtccactgccggggtacgtaaaacctgtcgatcctatagagatcaataacgaatgctcggcatgctgccgtcttgcctgaacaaaaaaagacttcaacaatagactgttgagaggtacactgtaccacatattgaaggtaaactagccaataggaggtggacaaataatgctatatggatcataaggttggtaatgagtagatatgctacggcaaccttttcagtggaaggtcaagaccgtacttacacaggatcatttctatagtaccttcttttctattcgactttccgaatagacaacctcaataactttgatgatcgtattcgacttcattcattgactcgggatgtcggtggtttgcagtgctgggtcctcttttggacctggcctcccccattgatgaacgtccgctgtcgctattctaaggcagcgtgagtgagtggagtgatatgggaagctattgattttctatctctctttttattattttttacctttggcccttaaaatagcattcacaactacagaagtttgcggtggagctgctcgacctgcgcgacttgagggcaaacagcaggcgtcgtcgaagctgctatggtgtttgtgactgcgaacctaatcttccttctctctacagtattattgtcatagtgaaatagcaccctgaaatgtggtgaagagaacctttcttccgtatattgctaattggcaaccacgaaatacgagtagctctgtatccgagtacatgtagctcaacctcgaatgttcaagttaccactgaatggatattagcgtgctgtcatctgtactggacgatgaaaggtaacacgactgaaaaatatttgggccctaagcgactaaacgtggcacgagcagctcgtcgtctttcggtgtggtttctcgaattaaaggtagttgccaacgatgcagccctgaatctcctggtggaaatgttggtacgccaccgctcactggttatgggtggggcattgtgagttcaaaaatatcatgagtggtgacaagcgataaaactttctctatttctccctcggtatggtgactttgaagccatgaaacacgtgcaactcgccgccagcggcgatcccatcaactgcagctgtggtgcagccttttatccgcatagaggccagagagcgcgagcttcgagcggaagaggaaggccacagatagcagcggtgaaaacaatagagaatacccttcagcccttttgcctgggtgatgtccatgaaaagagaaattaatctgaggaattcgttgggtagagataaaaacttgtacttacagtaaatagtatagctttactataacttggagtcaacattgcgcatttattggcttctgctcattccattcgtgatcttaggttagcaacggacggagctacaccctgcgggcagtttcgcccttgtgaccacatgaagtggtccacttctcattcttataattagccgtgtgtctggataaccgacgctgataaatccccgtcatggtgacctaagtacgaaaccggccgcagattatacctcgtccgctactaaggtaacctttagacacattggaacgactcgtacagacccctcttcatcgtctagagtctctactccgggatggcgtggctgctactactgctcatcacaaccacctgctgcatcaagctagtctctgccggggaataccctgccggttccttggcacctgtctcgattcagcatgggtacaggaaatggagagcgagcgcggcatctccagcaacttgctggcagcaagtcccgcgactccagcggcagactcgtgcacccgtttctccagcctgcgctcaagtatcctcgatacagagtaagcttacagcagaattttgcatgctgttctggtggttaatactggagctaatgggtttttgcctccctattatcttagatcgacgacccacggacgtcttccgtgaccacattctctgatagttgcatgcctgaagggcacgtattttacggtgcagatcacgacgctgacggcaagactcgcggtgaggtaaacggcacgctagtgttggacattggcgactgggacacgcattggcttgcatcgctggtgcttgcgattctcgcggaggaagtggtgcgtatatactattcaattcaacactccaggaaaaataacgccattttgatgcagaacggctataaggtatcgatcagtgtgggcggtgaaagcagcgacggtcttcagcgaagacaggtctgtgcaccccaacgcacgcgaataccgaggtctggatctccagctccatgtgaaagttgaaggcctacacccacgacagctaccgagttggtggagtcaggtactacgggattcaatgaccacggacggctggatgcttcgccgcctgctcgagaacaagaagccaactacaacttctaacttcgaagatctaaggcggagggagacagcacttagcgttcgcactgttgttcgtaaaccaattgatgtttttttttcttcatgaaatggcactgaagtttgcttctggctcagaataaatcctacgaaagcggaaaaaaaacgtgaccctttctgtcaatatcaaataggtgagtcggaacgtgttcaagcaccaaccacacgacgtcacagcgtcgggacgacactgcactcaggatgcagtcgccactccagtcgacgcgaagacccacgtctcgaactccgtccatcaagctacatgtattgttacatttgtgaaaaaaactgcaacatttcaaagcacccctttagcgcagcttgtgatatcaattccagatctatgaaaggtgccttaaccctttgaaacggtacaaatgcagaaccgagacacagtgtgtaaaataaaatagttatgagctaatcaattgtattcaagttacgctcctgtaccccaacgcagtagcgccttcaccaatattttttggcggtggacctatgattacacacaaagcctcaactggtgagcattttccagacgtcgtccgatacacgagtggggtagtgctcaaggagccaacgtccgatatcacgactcggtgatttcatccgagctggtccaggtgagcacccttcgcttctgactgggtgcaacagaagcacggcctcgaaatggcctcccatcgcggcattatccatagctgcagccgaccatttgtccgggtatttttcatgcagccagcgtagaactcgcacgtgtccatgctgagcagccttggctaccgaagcttttgagcagccctcggatcggttcgtctggagccacttcatcacatccagggctccgctgcgtgcggcgccgtccatcgccttgctggtgcagcctccgtccgtgtgctcatgccgccatttaacaacttcaagatgacctccgcgggctgctccatccatggccttcatggtacaacccactttagtgtgctcgagaagccatttcaccatgtccaggtggccgttagccgctgcagcgttcattgcatccatagtgcagccttcattccggttctgatgtagccattggacgacttccatgtgaccattagcagccgcaccatccattgctgcagtggtgcacccaggtcttgtaggcttctccgcccaggaattctctgagtcagagaacaccgagtctgcacttctcatcgactcatcgcccgtgtccgcaccatcttgatgctcctcatcacctgcagcttcttgacagatttcgtgcaagtacttgacgacgtccaggtgcccgcccaccgcagctgcatcgagtacactgaagtacttgtcgtcctcttcttcatacatccaaaacatttccatcccgagcttcacactgaactccgagtacagccacttgacgacgtcaagatgcccattccttgccgcagcgaacatcgtatcaatcgaaactgcgtccgcgtcgaacatgtccagctgacgggagatatacttcagcgtccgcccggagtcgcccttgctctcgcattctttctttctccgttttgggagttgcagcccggtcatagagatacttggcgacttccaagtgtccaccgatggcagcggaattcatggcaagaccaccgtttcctcccaaactggtaattggaaagtcatcgccgaatccatgagaaggataaaagccaccccactcgcgtcgtcctcctcttcgtcatagtcgccaccgccactttcctcgcccatatcctcgcgatctgtgtcgataatccagcgcacaatgcccatgtggccattttccgcagccctcagcagcgttccagcactggtctcactgtcgtagtcgcccttctcacgaacatacttgagcatgtccaaactccccttggcagcagcttcttgggttccctcgcagggcgaaatatcaagtttcttctgcagccactcgacgagggcgacatctcgaccagcaaccgcagccttcatcacggtttcttcttctctgtggccgtgtgcgtcctcgtagagccacttgacgacatcgccgtggcccgcacgagcagctttagccgcgtcatcgccaccccagcggacctttcgtttgccactatcttcctgcttcatttcgtcatcattttcttctccctcatcgttgtcggcattgctttctttgaaatattgcagaatctcgagggcgccagctcctgcggcttgcatcacgacacttcgagccacgtaacactctggaaaatggccaaacagccacttgaccagttccaaattctggagtttgaccgcctcaattagagacaacgtgaactggtattgtcggtagtgtttttccgagcggaggaagccgcggatggaccaggaagtcttcggatcttgctccaagtcgatggagctgtcccagatgcggtctagcagccgcagcgagccaaaccggcaggctttgtgcagtggcaactccacggaggtgtccaagaagagcgacactccgtgcggcacatgctccagcgaggaaaagtccgctctagcgtggaagatctcggtcatgacgagtaacggggaaggaagtgcagccatcttggcaaataaattgaaatgcaaaacaatacagtacagtcaaacctgtttgtatgatcctctctatttgagccataggctttgtcgctaccaaatatttcacttattttttgtatgatctctgtttatatgcatacaaggtatatgagtcacatttttggggaccaaattaggtctcacctgtttatttgattcacactgctcacggccacacactcttcaaagcaccactgctcaacactcaacgcctaccgcaagccttcttcgctcgccatgtctcctcgcacctgtctgacgctagaacaaaagctccaagtgcacctaaagctcaaacagaatcctggcatgaacaaccccatgctcgccgagtggatctacgcaactttcaaggcccgggtcagccgtgccacgctcgcccgactgcgcaacctgccttcttcctacttcagccacgtcgacctgagtgcgaccaagcggcgccgaatgaaatcccctctgttcgagcgggaactgagggaatttttctttcagaacgaagctaaaacggcgatggcggacgacgtgctcctgctgaaagcgcatgagctggcggactgcttaggcatcgatgccacgcagctccggctaagcaacgactggcttcaaagctttaagaagcgcaatgggatccgctcccatacgctacacggcgaaggtggcgctgtagaagctgatgaagtgcgagatgcgaggctagagctacaagagttggtggcgcagtttacacccgagaatgtgttcaacttcgacgaaacggcgcttttctatcgcttagcgcctaatcgaacgctagctacgagggcaagaaaaaggagaagcaacgtttgactttggccttctgctgcaacgcgactggctccgacaagctcgacccaatagtcataggtacggccaagaacccgaggtgctttaaaaaaggaacggcgattaaaggtaaacctatattgtacaagtcctccaagaacgcctggatgacatccgtcatttttgacgaatggctgcacctcttcaacatgagaatggcggccgccaatcgcaaggtcctacttctagtcgacaatgcttcatgccacaagattctacgaaacctgactgatgtgactgttcacttcctccctcttaacatgacatccgccgtacagccgctggatgcaagtaaatattttatctatattgtggtgtagcctaaactaaccaactctattacggtgttttttttattcaggtattatccggtcgttcaaggctcggtaccgaaagtattttgtgcggtggtgtttggatgcacttgaagctaacattacacgcaagctcaacgtactggaagctgtccaattctccattgatgcttgggcgggtgtgacgccaacgacaattacaaattgctgggtcaagactcgcattttgagaggaaagatgctaggatggacccgtgctgacacggattacattgaggaggtatccagcaacgagatggaggagttaacggcgatgctatcgaggtgggagggcgctgttagcgctagtgagtatctggcagtggacgaagacgttcctgtgcacgagccagatgtgctagtggacgaagcggcaggaagtgatgcagtttcgcaggacgagcaggaggaagaggaggaacaggaacccgcagttcaacctgccattgctctgagacactgcatggagctggctgcatttctgctgcaatgcggagagcagactgacagagaacaaagagctttacagaccgtgaccgctttggttcgagagactacggtgaaggcaaagcggcagcgaactatgcacgatttctttacgtgcaccacataattttttttaactgagtccattttatatgagtcaatgtagtagatggtcaccaacagggcctcatataaacaggtttgactgtaattctttttacatagtttatgtcacgtcatatgtatcagaatgattgcataatctgcgggtgtagcatcatgtgagatcttggcatcgagctcgctcgcacaaaaacgacaggcaaactggtatcctaattcccaaagcagctcgttacgtgtatagagcacatttgaagctgaagccctcaatgaagttggagaaaaataaactgttaacttattaaggatatgctctcgtttgtagctcaccagtcgactgtgaccgcgcaatatttctgctgttggttgcatgaactcttgtctgattccagccagattcaccatcgacacctattcgtctatcccgttgcgtcttggaactcggcatggcgagcgaggacccaatcgtggatttctggagtaccgttgtcttgggtcgctgccgcactctcttcagtgcactgttggtggcattgaaagtaaagaaacaacaacgcctcgaagctgtcgtttacagcagcaagatccgccgtcgcacttgtacaaccctctccacgatgagaatgtagccattgcagcacagtgaaatgcccctcgctggcagcgttgtccatagcttttcccgtgcagccctcggatctgttgacgtgtagccatgtgatgagactgagctcattgtattttgcggcctgatccattgcgctaaccgtacacccttccgaccggttggaatgcagccacttcactacatcaaggtgaccattcgaagctgcatcatccatggcttgagtcgtgcaaccagcggtggtattctcgtgtagccacttcataaccaccagatggccgtgagctgcagcgccatccatggcgcgtgttgtgcacccttcagatctgttggagtgcaaccactgcactacttcgaggtgtccatttgatgcagcgttatccatcgctgccactgtgcaaccttcagagcgatacgcatgcaaccatttcacaacatccagatgccctcgtcccgccgcgccatccatagcgtccttggaacagccctccgaccggttctggtgaagccactggacaacaccgagatgtccattagctgcggcattcgtcatcgctgcctgcgtgcacgttggactggatcgtggccttgattcatctcgtttacgcttcttcgtgctcgcgtccatcgatccttgcagtccatgcaaaaactgcaagacgtccaggtgtccattcgacgctgcagcattcatcgcaacggtggtggccgaggactctccttcagcctttcgaccatagtcgaatagatcaactttgggttcctcgctgtactccataactagccactgcacaacattgaggaaacccttttgggcagcccaagtcattgtttttccggatacaactgtagcctcattccacgccccaagctgcgagaagagctttcgtagttggcgcctctgcccaaggtcttgcagtacaaagtcgatatcatcttttggggcggtcgaacgagcacggaggtacttggcaatctccaagtggctgttgacagcggccgtgtgaatagcgaggctcgcctccccgcccagatccgtcaagcgatacccactaccctcgtcttcatcatcgtcgctgtcgtaattggttatatcccgatcaatcagccaccgcaccacttcaaattgccctgcttccgccgccttgaccagcactcctgcaacattctccacctgatccttgctgtccaaccacttcaacacgtcgaggtctcccgttgccgccactttgtgcgcaatgcggagcccaactcgtccctcagaccattcatatccatgttgaatcagccactccgccatgggaatgtccccgttcttcactgcggcttcaagtgcaccacggcggttgttaaagtctcggaagtgggtatgtgcccaccatacaatgtcgttccgtcgactcgccactgcagcccggaggaacttccccgtccactccacacacagccccgctccagcagctcgcacagcttcatccaatgcaaaattgcctttatcgtggaaaaactgcagaacctccttgcatcttgcactggcggctttcaccaccacttgagctcggaccgtgtaacccggaaacttggccgccagccacttgaccatctcgacattttttagctcaattgcctcggtcagagacaaagtgaactgatattgacgatagtggcggtcggtttggaggaattcgcccaaactccaggaattgttggggcgggggagttgactatgggcccagagacgctcgagcagcttgagcgagttccgcttgcaggcctcgtgcagcggcagcgcgatggacgagtccaggaagagcgagacggcgtccacgacgtgcgggaggtccgtgaactggcccttggcgcggaatagccacgccacggccagcaacggaggaggagttcgggctggctcggccattttgaagtgcaagaaataatagaatgcgtttagaaccccctgggatagaatagtaaagttatacttatgaagaggttgccaaattcacaggtcgaacgaagacctgtgcttgaccccggcaaaatacttataactttccaaaacccggtaccaaaccgggtctctctttcttaattgtaatgtttaagctaatatctgccggaatcgggtacccgtcgataaatgctaagatttatgcacattatttaccaaaggtggatactgatcgtttattactgaccaaaacctgcattcaaacacttacggacgctctagtacactatgagagcgtcatggcttcgctgaatgcgtatcaatttgcgccataatcgaccaaggttagctgaagatgaacgacttgacttgtctagctgcaggctgcatttttttacatgtcaatttgctcaatacccaatcactcttagccgaagatgcccaacctcgtgtctgtcgccaaaccaatcagctcaactcgacagtgacacgagcatcgttcatttgaataagacttttttccctccgttgaagcacacacttccaaggaactggcccatttgcgtatatctcattccgcaatttatcccccaagccctcaagttaaaagtttgtttgtttgttttgtttttgaattgaggatcattattgtcacttagccaacatcctcaagttaaatggtcaagatcagcgcaccatgcgtctctccttcgttccgcaactgtagctctctcgtctgatcgttagcacacaacatagtacaaaaatgagcacagtataccttacctgcaaaatgaatgaaatagctctctcgttgctggcgccaacgcagccattggacgctgaccagggtgctatgtcaccgatggcctcatcagaccaggcaacctcaattggtgactttcggttcctgagaacccaccacgataaagaagagcggggcttgctggttaccagcctcacaaaggtttggctgaaacatcatgacacttcgatgtgcgcaactatttgttcaattacgcattctcgggcagatgctgcggctgcgaagcaggcgcagtagatgcccatgctagaataaactagagagttgggctggtagtgcttttaaggattaaaaacaaaacaacgttaggatttactcaattattatccattatcatcgcccatgaaactattcgtcgacctgtgtacccccccccccccccccccggagcaacgctccggattacctattggtttatgcgagcttgacaaaaccttgtaatcacgaatggtattggatctgatcagcaaagtgcgtcattcttgaagttgctgccaaaacgacaagagtctcctacgcatcaagtttcctgtttgacgatgcgtctaggattcgtcctgttcgcagctgtagccagccttctcgcaagctccaacgctctctcaatctctaagaagagtgagagctctacggttgccaagagcccgcctggagtcacccgtttcgtcgatggaaccataccgtccacccgatcactgagagggcaagaccccgcgagcgaggattccgacgatgaagagcgcggtgcagctgaactcgagcgtgtggtctcaagtttgcccaaaaaggctcagagttcggtttcctctctcaatatatacgacgagatcaaggcgctcgaagcgtattataaacagcttcaagcctcgtacatgccggtgttcaaggatcttgcgctagttaaggggactactcctgagcaggtcggcaataagctgggcatgtggaaaaataattctagaccatgtcgatggatcagctgaaccacgacgcaaacttccactttttcaaagagtacaagagatactgggacacgtttgacaacaaggagccggcgaagctcaagcgatcggtctctaacctgtcctgatcccccctcacttgtagagtgagtgaagagcatttttgcgcaatagaatgttcaaatgagaatatcatcattgaaaaccagctcgctttcggcattacatgtactaccatgcaaccttcatctcgcatccgatgcagcagcagcatgatcccgctgtacagccttgacaaaggcgttcgtgacaacggataaaagggcatttgccatgctagtcatgcaaccttctgaccgatctctgtataattgacgtcgtgcatgtggccttctcgtgctacgagacccattaagtccattgcaactggtgaacgaccttgacgaaactatgcttccttgcatttagtatctcccactctcctgacctcgaggacgaccaccctgcagatatgcctgagttttatcgagatattatcattcatggtgtgtttccctctcagcattgttgtcctaagcgttttgcatcgtacttaccgattgtgaaaagcgagttgatcattaatacttagaagaagaaattcgacaggaaaaacggtgaattatgctcacggagagagaggtagctgtagctgtagaatgagctaggacggtaggttacactacacgaatccgtttcgctgagcgtacaaatactgggccagggctttggtgtccgtcttggaaagtccgaaggattgttttgcgcttttgatgaagctcttgagagaggttttaaaccctcgttcttcatcgtcgtcgtcgtcttgattcgaagtgtcagcaggttcagctttgcgcaggtgtcgcgtgccctcgtttagagttgtctcgacgtcgtggaccatgtctggcgatgccatagtcagagtcgcaccctcgttggaagtgagcgcgttagtgctgctctgtactgcagccgcgacaacgaacgcgagaaggcaggtcagacgcatacttgacgttgcctttgaagagttggaagagggggcttgagcgcaaccaggaaaatcggagaataagcttgtgttcatcctacatgtttaagcattcgatcgacagattcaagagccacgcatacttacagatgtaagatgaaatgaacgtgcacgaattcttagggacattgatttgtgctaaaaccacttttgctggtaatcaagttcggtcgagttgcatcttagaaaaatcaaggtactgtaccatagtgtacaatctactgtaggttcattcgattgtttaattgtattcataaacatttggcattctgataattgaaatctatgacagagttacagtgtaattgtccactttggcctagacaaccacaggaccttcaaacttgtaagcatttggctctgaacttattgtaatcatgagcataattcaggagagattttcgcgacgggacaggctaccctcctcctcgctgtgctgctgtaaaacaaacgacagaggtcacaagacaaggcctcactcaccaaacatatgccagaccactaacactgatttaaaaggtacatgtgtcattggatatcttggatatattgaactgccagttgtgtcaaaatgaaatctacgctgcccgcaacgccgccagcatcgcatcgcgatagtgttccatcagccactggaagatctcggacatgagcagatcgtctttcttcattactaccttgcaaccttcatcccgcatctggtgcagcagcagcatgacctcgaagagtcgcggtcggcacggcgtagaccagcaaaggtcatttccgaaaacttcacctgctgcacacttgcgacttctacacgctcctcataatgaaggcccagatcgtcctcgctgctctcgccgctctgttgttgcccgtgtaagcgcctgtcgatggctggatccataaactatgtttctgacctctgccttcagtcagtcatggtgcaaatttacagtgtactggagcgatcgaccaacctagtggccccgttgccgagagctcggcgtccgacttcacccagaaggcatgtaccgcgtcgggcggttcgatcgaacctaacaggaagggtaacgataagtgctgcgtcgtttccaaccaaggcgcatttttcagttcgtgcagaggactcaaggctggaagccaattcccgaatggccgccccattcccgcgcagtgctggggtaattgatgataaccattttgctgctatggagagttcacacagcaattgtgttccatgctacatggcgtctacgcaacgatatccattttgaggaagcagcaacagagcaaccaagcactcaaggtttgatgagttcatttcgccgacattgtcaatacatgttccagcattctgaagagctgaaactggacgatgatgcaataaactcggtgcttcaacgacttgggtttgatgcacccaaaccaattagtttaccccaacagggttgtcgaatttggattccgcggccataattgagttgtccaagtagatattaccataacttaccgtagctagcgaaaccgcatggccactacagaattctgcccgaataaggaacgggtgtacaactaatagcctcacatatttaatattattttccagtcgatgtggcgatagggggatgtgcaaggtactgcaaggtactgaggtactaaggtgaaaaatccagtgccaatcatcagctctccaccctcgtttgaaaaatggcgcgcatttagcagtagtaggatccagcacaaaacccagtcagtttttttctccccgtaatttaccatagagaacagtcgtagaacgttctccgtgaaagaggttatttcaacgatgcacacgatcactaccctctggtgagaaggaacacccttatcacctccaagcgccgcataaagcaacagcaacctcacatacatcaaatgatcatttcaacggcacggcctctcgataacttagcacgaaaggacgcactcaaaggatctgaggatagtttcggaaccgctcaactgttcagaggcaaatctttaaatgacgtttaatcctgacaaataaactacgaagtatataatatcatcataactaagataatgtgcatgtttgtattgaaaaacggaaatgtttgtagtaaggctccgtcaaaagttcgttgtatgaagcattcgatagtagtatcaaacgtggaaaaggcagaggcaatgattacgaacatttttaaagcgagacttcaccacgacatttcgtgtccttgtggctacgtaggcaaacggtggaactatgcccatcattgtcaaactaagagacataaatcgtggacaacatcaatgcctgaatctttgcatggtcattcatggagatcgaaaactgtagaagaattgacctgggtacaagctcgttcaagctaatccgaattccagaatattttttttcaaaaaaaataccatcagcttaggcgagctcatcaagagcacccttcagcttagacatcttctgattaacgaattcattcttcttcaaccattcgatgtagttggaatcgattgcttggatttgtttgatcgttcgacctttgaatttgccccaagtcattaagaatgacccatcatcgttgatgaatttagctttgagaaaatcacaaatgccaggctcggaatcaatgagaatcttctgattcgacaaccaacgacagtagcctggatcagaagcatacacttcttcaatcgtcttggatttatgcttaccaaaatttaaaactaaattcatgattattatcgactgtatctatatacagagccagcaggaaatatttgaattttaattaattaattcgaatacaagctacaagatgaccatttatgatctaaggaataatgaatcaatcgttggcttaagtctgaacagtttaacagatagaggagagtcagaattacttgtgtcccaggttgagataaatgtaaaagttaagcaagtcgctcgtgggataggaaaaacactcctcatagtaaaaagcaatgatcgtagaattaagctgaagagtggtgattatatagttatcggatcatacaaacgatagcttagttagaggtatattcgagtacctctccagtcaatcgattgtacgtcatctcattttcaaagccaaccagtacaagcatgttgcaaccctgtgtcgaagcattcgttcccataacctggatgctctgtggaacatccttctcggtcagacgagatacgtctgctacaagcacacgattggtttgctgccaggtttggtaatcgatcagaccattcgatagttccttagttagatcaccattaatcgatccaagcttagcgaactctttgatgaagtcctggaaatcgtagtcatacgagatatcaaatacttgctgcgaaccaatacgaacattaaagttgcgaatcgacgaaccaggctgaacagtccaaggggcactatcgaaacacgactggaactgctgaatagtagagctattgaaatttccagacgaagtctcagcaaacggtagaagagcaactaccttggcattcttaagactggcagacagctgtagatcgaatgcagtgttcagctgagtagagctgacgccagtacctgcgcgttggtagaaccattgcgcatagtaatccatgtatcggacagtcttgttaggcttgctgatcagagcttgaggattttcgagatcaaggaatggtacgtacagacgagtagtagtaaaagggaaataggtgctatcaatggttggctcaagagaattggtaatagcaccccatgccaccgagatctgacctgcggtcgtagcattaaatactccactattaggagcagacccagccgaagaggctaccatgatcgggcatgattgaccagaaacaagcatagtcgatgaaagcgacatagctttagtagtgctaaggttgattacggccgatccctgatttacgcggaaacgaagcttgatctgaggattagccatgagatcaagctccttgaagatcgggtggagatcaaccaacttgatcttgagcatgtaattccacgttcctgcgatagcagcagcagcagttccaccggggacgaaggcccctcgcccaaactggttagcaatagtgttcgcagctccagaagcgatactaacccaaccgttagtgttctgaccgcctgctgtaggtggattggatagaagacgctttacgaagccttcgttggatgcaacaactccagcacctgtagaagccgtacccaaagcaggagtgatatccgaagccgtattcgaataaccatcaccatacaggctgcttgtagcagacgagaataacaacgagccagagctatcggggaataagaaatcctcagcaccatgcttatttacatagtcgagtgaggtctctgcttgagcacgaaggttgttagcaaacagcttatactcactcatcgaaagcaagctcttaccattaaactccagcgacataccatcgataacattccatacaccgcatttgagaccaacgctcagtcggttggcagccgcagcaagcgcagtagaagcatgagtattcttcatactcaccttgtacggaatgacaacgtaggcatctctgaggcaggcaaatccctcagccccattaagctgagctgtagcatcaatcgtaataataccattcgcatacgaaccctggtttagatcgatgacgtacggcacacgctttcgagagctgaccttaacggccggatcgctcttaagcgaagattggtataggaattgatcagcgagctgagtatcggacatagttgattcagttatatacactccaatatagctttggtgaaaaataattaaatgaatcttgtaaaaccaatatcatcagatcacgatctaatagctttagctaagaagctcaatgttcatattgaccacatttatgagtcaagcgagatcaaaaagcctcttccaacgaaaggatcgttcctgattctactacgtaagccgagccaagacataggtcattggacaggtgaatatttcgattcaatgggagaagggccaccgaagaaatacggcatcagcaaatacaacgagattcaaactcaatcagctcacggctcttattgtggtatttggtcgctgctatgattatatgcaaagcagaacaatcggatggatctattcaataaattcaaagatttaaatatttttgttgcagattagttctgagttaatatatactaccacgcaaacgttgtccccaatcaacaaattatgtataacgaacttatcatctcgagcggtgttcccgcccataaattacgaaaggctgccaatactggtaagctatcccttacagcagcagagctacaagggtcaggagctaagatccatttacatcctgaatcgcatgagaaagctctcaaagctaagaaggccggacgtggagttcgactccacataactaagcatgaaatcaaaaagggctacaagcgagctcagggtggatctatttggtcaaaaatttggcatggaattaaatctggatttaagttcgctaaggatagtgggttgctatcgaaggcagctgacgtagctgttccagctgttgctactgcatttggtgctcctgaagctgggattgcagccagagctggtcttatatcgcttactggagtaggattggacggttatgagagcgatgaagaaggaggacgtatcagtttctcagatgtaaaacgacatgcaggcagtgctcttcgctattctaagacaagaggaatcatcactgatctaatcgacgaaggtgagaaatatcttgtcagcaagtctgatcgaccagagcatcacgaaatgattcatagtgttcgtagaggtatcaaaacccgtttcggtgtaggtgtagctggcaagcgtcgtaaggccaaattcacaaagggctctcctgaagcaaaggctcatatggccaagcttcgtgctatgcgtaagaacaaggacgggggatctttcacaatgtaaaggctgaaaaaaacttcatttttttatgctcgacgcttgcgtagaagtagcataatattaacgctcgtatcgcggaaatggactctttgatcattctgattccagatgctgatgcttacagtactccttggtccatcgtgggtacgacaccaagtctcatgacttgggaagtattgaatctgcttaccaatcgtcgaatcccctttatcaaatacactcatgatatcacctgatgcaacgaaatcattcttgataagatcgcacctaacaacgtatgaagacgttggcgagatctggggaatagtattgcttggcagactcgtagctgacgttgtaggcgaagttggatacgtccccgacgtaaagcctaacaggtttccaaacgcagcattattgatgttcaagcgaggaacacgagtcgtagtaggcaatccagtaccaccactcgagtataaaccagtagttggtctcgtataaccggtaggcagcgacgttggagttggcgagcaatcgagctgacatgcgtaatacgtactgttctcttcgatttataaatagaaaacattattcccattagagtcgattagataggccccagcattgacgagagccgtttgaatatttctattgatgtctgtgtaaagatagtatccatcaatgagattgacactaatgacacttgtcgttgcagcggtaggtacttctatctgaaacgatgtattggcgaactgaatcgaatcgacattgaattccgagttatacagactgatcgactggatagaagcctcaacatcctgaaaattgcacgctgatccggggaacgtataggcccatcgactgttgagcctatcttgaaccaaacaggtttggtctatcttaacgaatgaactcatcgcttatattatcaatttaataattttcaccaattttaattggtgtatcaaagttatagcgtatttgacccttgacactatcgataaagagcatctggccttttcctcgagaaatcgcccggttataataatgaaggatgccttcctcagtcagacctggtatattaaagtcggtgataagtagcttcaaatcccgacgagagtttgctcggaggatcgcgacgtattccgtattcaatctaatcatcttgtccgttgcaaaccagctgtggcttaggaatatggtactcaatttgaaatgccgacctctggtaaagtaatgactgaatacattcttctgaaggtttttatcgttgctatagtcgtcgatgatgacaagctctggcttatcgccaggagtccgtcggatggcatctaccttaggcggttgatcaggttcgtaaaatgatataaatccctcaagcttatcgcgtaaatagtcatatagatcctgatgagggtttcgagcaatgatatgaagatgactaaacacatgcggagatgacttgagaatatgataacagaggttgttcttcccggaaaacgatggtccaagaataaccatgcgaaaaagcttcttgatacctaattccgctatgtttccaactgaatcagctcgatacttcttaggtagactgcctccataatcgggaattgcagacatggctaagaaaaatcgtgtgccttatataagattgaagaaatattagcgcgccactaaacttcgacttcagtcgaatagcttatctatgagtggatttagttatcctcaacctacattcatttcatcgtgctacaatccggcattctacatctcgctcgatccgagtggatacttaacatatgcatatgctcaaacgctctatctcggacgaagcgactatcgcctatcatacatcacaggaatcactccagggattgcaacacctggtatctcccttgtcgttgcttctgatggatcgcttagcgggttgggggcactgagttgttcatcacttaccgtaggaggatcatcaatagtagctcctccgacatatgtattatcgattactactggcactgctgcttcatctaaagcgcttgtactcgattcctcgagcaatatatcaggcataaattcattatcagctacgaacctaactggtacactacagactgctgctcaagccaatatcacttcagtaggtacgcttacttcaatcactacaagtggttccttaaccatgagtggaataacgaaatcttcatctgaaattggagtgcttgatggagtaactcctggcactgctacggcttccaaggcaattattctggattcaagtaaaaatattgctacgattaattcattaacagctacgtcgattactggtacattgactactgcagctcaaggtaatattacttctgtgggcactcttacatcattagctcttggaggaggtatttctggcgctactactattggtgcatctgggttagttacctttaccaataatactgcctcgagttctacttcaacaggagcattagtagtaactggtggtattggtattggtggaacacttaatggtactactattaatgcttctggaatagtttctttaactaataacacattatctacatcagcaagcactggtggcttagtgcttagtggtggtctgggtatagctaaaaatattactattggaggaacagctgtatcagctgcatcttggactacttcaggtattcaatacaactcattagctactacctatacaaacacaagcacagcttcttctgggacagcgacaagtgctactattacttcatttgctcaaccaactattgcagcttctaatgctacagtaattactacaaatgcggcaacagtatatattgctaatgctcctacagcaggaactaatatgacaattaccaatgcttattcactttggattcctaatggaaaggtcttatttgatgcggctatttcatcaactacacaaaccaatggcactttagttgtatctggagatatggactcgatagtgttcatttagtgagcggaggcactatcaatcagactctggctaatcaaagtagttggttatcgatacagagtgataacactacatggctcgatggcagctttagtctccttgccgacttctatggcaactcaggcgttagagcagctatccaatgtcataactcaacttcagctattctacaaattctgtattctttggctcgatgaccaataacgatttgagattggggacaaacgatagcacacgaatgactattctgggaggaacgaacgctggaagggtcggtatcggtacaacttccccagcagcgcaattagatgtatccggctccgtgagccaaactatcgatgcggtggtttaggctatggtcaattgtctaaaaccagtacgacatttaccgttggtccagtgagcagcgtcgccgtttcaatcaagagctctaacagcattcttgtaagtagtgggtcctattatacaatcagtgataggcgattaaagaccaatatccaagatatcgatgataccactgcattcattcgaaacgttagcccgaaactcttcgcgtataaatcaaattcagagagacaagaactcggctatatagctcaggatgtagccaaatatgcagtcgagtgtatctctttcattcaaaatgattctttgcagatagagcaggcaggagacatggctgggtatcaattaactctcgattacgataagatcgcttgcttactccataaatgcctccaatctgtcctaaatcggttagacgctctagaggataaggggcatcaatgaacccgcgtagcggctcccttcgggcaaaaaaactttattctatcgctttgaaaaagctcagatattctattgcttgaaagcaagagaccttggtctcgaggtgagagctcttggccttcggtcaaatcgctcccttggagctcggatattcaggaggcttacagagcaaacgtctttggctgcttgctcatttttttctttggtttgtatgcccacatacgacctccgtctgcttcggtttgcgtagctactgacttagtggagaatggctttgagtcgctcgcccaaacagttggtctatcttggtgaggagcttccttgataatgagatccttcatcaggtgcttaagctcagtgaggttcctatcggcattgagctgatagatacctgcgctcttggaaatcagtcttggatcaagaatcaacatcttataatagtctcgtgataattgatttgaattcagaatctgaaatcaatcgattgctatacatgtcgacacagaccaccttcaactgctttagaatcgttggattatcattcccaagcatcagctcgcccttgagcttatcgtactccatgcgtagggaatcaagaggatcctctaaattatgatcgaagctgtattgcaaatgtgtcatctcaaggatttccttgaacaatttcttatcatcaatagatagcttatcatacttctcctgactgatatggtttctgaagacaagatccttgatcatggcttgtagaggatcactgatctcacgcattgggcctacttttcgtcgatttggctgaacgatcgtgagagttctcttgtcgagatctggtagtctcataaacttactgccaagcttcctatatatgtaagcggaaggagttgctttaccttgaatatcattcaagttgtaagcttgatttgtttttcgtaaaacacgttcgagaggctggatgccagccccgcgaaggcctcgacccttgagcttaccgccaacggttggctctttaatcttaaccccatgtgccttcaaaacgtacatatacagcttgagagcattcattattggctctttggttgcattatcaacgtcgtgatcagagtggataaacgattccatctctctaaggtaatccattaatagatttaatgtttctggccattggatacgcttgaaaaagctggtatgagctttaccagataggggtgcatttgacttagagtccagttttctaagtcgtaggttgccatcaataacggcgaaatagtattttttatttggattcccacttacgatcggaagcaaatgaattgggaagatgctatctgatttacccgcttcgataaagtagtcgctgataattgccttcgcctcagtctctgggatagataggtcctccatgacatctggtcctgacagcttccccttataccaaataccttgcgtggatttgaactggtcaggatcactatctaaaatagtgtctggtgatggttcaaattcaaaagtcaatcctcgtgacttaaccgtctcgataaacaatgacagagttgatacccaagagataccagatagtcgagattgcttattcctattcgtttcttggtttctaacattgagatcccccttagagtcgatgattagttcgtgttggtctagaacttctccatcttttaaaacgggccttatgacgatgttagagcaaatcagtttcttcttgtaagccttcagcatgaataggagctttgatttagcttgttcctcacctattgtagtcgatgaagaagcatcgtgcaaccatattggttgcacatgaattttgttagccgttttggttgaagtagtaaatctatgcctcttactaccagttatatcgtataattgattcggagtatcggtatcttccatgcgcatcaagctgactttatcaatactgttcgattcttcatcggatctaatattcatcagttcagttgcggttagtacccagtcaatgtacttagaatctgacctcttatttgtcttgagactgaacaggtttccatttttttcaatatatcgcctcatatcttgggttttattggttttgattggattaaatttaacagcgatccagtttggattagactgatagagtttcttgatccatttttttgcaatgaattcttcagttttatcagggagcgggtgtagccccccccgggcggtcttcgaccaaccatcagttttaacttcagggacttcctgagagtttgttctatcttctgtcgcggtatcgctaactacagggattgtagcatctacttcagagtttttttttaaatcaccatctccagcttgattagaagaatcttgtgctgagcggtcgctcaggcgtgaggcgaagccggcagtctgcgactgcgactccacctgtggtgcggatttcttctcgagggagatggttttattggcgtctgtggcccatgaagcttcagcatacatacggcgagcttcatctttctgtttaacccgaagcttggtgcgttcgagtagatcgagccgcttctgctcgcgatcggatagactcgtgaatgaagggaacatatcgattagtatatatatcaaactcgatattttggcttatattcaatgttaggtatatcttcccgcgactcccaaagtttcatagtaaatttatgaacgatcgaattgcgcctttggagcaatctgacgtacgcgtttttacattcatctataggcaaaccaaatagatcttcgacctgatccttgtatttcggatcagagcatacataacgatatggacgattggggtcgagttggtgaagatgatacttgatatagtcgagcctgtagatatcgttgagcatctgattgatttgattgaccttatcgctgtagaatctcattcactgatgcatctttttgagttctttcttatacatttcaatcttgtagtcctttgagtgctgagtacaataaccacaaggtagagcatctctcgagcaaggtttgttggacttggtcgttgtttggcaagccatattgaatatggtgtctatatatatagcctatatattggctatgtgagataaataattttcttcaagcttgcttctcctatttttattgataaagcgaaggttatcttgaggctcccatgagtcgggctcactgcctactacccatcggattaggtatttatatttgccattattcatatttttatgggctaatatcttctcagcttcgagaatatcgccacggttgatagtagcatctgtagtatctgctttcacaatctttaaatcgttcggggctttgtagagcgtatgcccatttctggaacgaatctcaacccgataaccatcaatgccgataaccgagtaaatacccttgctccactgagcagcttccttatcaaatgttttctttttgagacgatacagtacattcgacccaacatcaaacgcgttctcgaccttatcagcttcagcttgattatggttcagatccgccatcattactgtacctcttgcctcgttcggggtcataccaatcgagcgatgaaatgtgctgttgtagttatcgataacatcagctataattttctgtgtgagcctcttcggagacattttggttagtctctgctttatagttcgattgaatctctcgattttacccatcgtccgatgatcaccaggctcgttgttgaagtgctcaatttttttgcttttgaagaattcttgagtctgtgagttcatgaactcgctgccattatcgcttgtaatgatatccaccttatggaggcggacaaacgctttaagcgctgctaacacacttgatgcagtcttgtttgacaaggcttttgcataacggagtcgagagttgatgttgatagcagtcaatattggtttcttgtcccagaacgcgagatctatctgccatgagttgggactatgtgaagcaaccttgaacccatcaaatcgcttcttctgctcctgaaatcgttgaatatctgattgggtagcataccaatcctttacatattttagtgtcatgttaggatctaactcgtgagccttctgataaagtgcttgagcccctatgaatcctgtttttgggtcataatagagttttgttagcagcttagacagggctgacgcccaggcaaacttgttcgcggggcaaagccccttcgaacttcgttcggacatgatatattgtaccgtaggtactaaagagtattctacgaatacttatatattgtagtacttaaatttgtagagggatagtcgcaataccgtctgagagaacttgtcgcttgtcgtaatagtagttgagagctgttttcgtttgagtatatgtgatgattgacttagattccttcgatagtctgaatcctttgttcgtaccttggagtgtgattcgatcccgtacaacagtctcgaaaccatttggattgagtacatcctcatttcgacctcgcccctgctgcacacccttggctgaaaccttgaccttgtaggactcatctggcagatagcaaatatagttcttggacgatagagagaccatggcatctggcatcacctgaccattcatccttgaacaaaccaggggtacgacgatcaaacttagctacctcagagttatagtcgcgcgggaaccagtcatacttgtactgcttgaaatggtcgcgtagatcaggcttgatgcaatccttgaaaggattctcacagctgaaagcaatatacgctgaatcggtatccatctcctgatactgggaatcgcttcgatcgaagtagtagtcaatgcaatcgtaataaaactggagcatgcgcagcttggcgagctggtagatagcaatcgatagatgaatcgggttcttgttcttaattcgtctcttcttcatggtgatttcacaagcatcgtttagctcctccagaccatggaacgtgaaatgttcgatctttgcctcaattgccttctgatccgactcatacttgacctccttatgcttgctcatatccatgccagatcgaccgaatgcgctgttgcctacaagtttcatcatctccgcaatcatagatttagacttatcagcgtcaagctgttgcttggagtcggagattcccagggactgcgcccctgaggtcccttcatcaccctctcgtcgagcatttgacacagcttccatgaaaggagcgaatgccgtgtgagagctggccttgataaagctgtaggtcttggtgatctccataccatgagaaaggtaccacttgagcagcggtgcatagataaggatcttttcaccaaagtagctaccaatcaacttacgagcaggcttagaacgatttgcttcgcgagactggttgtaatcaaacatatgcttgccaatgacactctcatcggtacagtctatcagagcattcttgaaaatgggagtcatctcactaaaatactctttcaggtgctctggggttctaatatcacactcgagaaagccaaatatcttgtcgttcttgatgtcatcgatgataccagggtaagcctcaatcgtagtcaatcgaccacacggcatctcattaccaagggcccatagatatagggcattggcatcataaccgataatctttttacagagcttaccaccgcgaatctttgtctcgttccgcttggcgtagcggttgaagataatggatggtccaccggcgatgttggccttcatcttaccgtatatctcagattcctccttgtcaatcgaatagaccaatctgttcgaattgaactcgagcagtttcttgtatcgaaaacccccgagagacatatccttacgagcggtattacacgaaatgcagctgatcaagatgttcccatcgaggtggccaagcttgttgttgattctatcagcagaggcagtttcgcaagtcagctgactgtagcacaaagcacacaggtacttctgatgctttagcaatctattcaagtgatcaagtgtcataccaaaatctcgctttgccttatcatcctgattcttgtagccaaccatacgcttggctgggaatttgaacgctttagcaggcttcttgctggggtattgtagatttttgaagcaagtctggtacattactttctccgatggaccaggtagagacacaccatcgacaaacatatccagatcaaaacgtttaaacaactcacgctgagcttggatagccttgatgaatggaactacatcgagattgttgtataagatgagtagatccttgattgacttcatttcaaagtgcccccagacaaacttcacacgctcgtactcatcattggagatgcttgtaccacgaagcttgctgtcaaaagctgatttcggtgggacttgagtttcatttaggacgttgaaactggtaatgtactcgtacaggaaaatacccttaccaagcccacaaacacagctaatcttgtcctcacacttgcatccaccgagataggtcgtcaaatacttgtcatagctggtgccagccggaacatagttgctgatatcaagtatcttcatgttccaagttgctatgcacaagtaagatggattcttgatgacagatttgatgttattggtaccaatcacagcgaacaagtcgctcttaatcaagttgatatcgtatcgaccagaattgaagccaaatactggtacctgatcaagctgctgcttgattttaccataatctgatctctgcttagcgaatccaattttgttatggaaatcgaagaaactggaatattttccttctccaatttaactctccacgtcagacatcttgtatgtcttaccaagaggggtgtcggggatctccatacccgtcagaccgtgagcgttaatgatctttcgtaacagagactcatacttggagacattgtactgtcgaatctttaaggatacatcgccaatatattttaacatatcagtaagcaatgcttttggatcatcatttacaaagcaacgtacctcatcagttagactatcggctattgatactgacacaggaatatgctcgttagtaaagacagtattctccccgtgttgagtagcggtaggcttaagaatggtctcaaagtcatacaccatgaaatgatcgatatagtgatcagcatccttgatggagtattttgtttgcagtgatcgtatcgtgttctgagcaggtcggtagatcgttggctgggctgggaagctttcaatatttactcgttcgcattggttcttagagtgatccttgagcttcgtggagctgacaaagaccatttcacacttcttgcattgatacttgctttggagcatatcaacattcttgatatatagagcatgtctctcatgcgatagaatattcatagtttcatactcattgtcagagcgacgaatgcattcaacgttcccagactcaatatccatagtatagacattaatactgagtttgaagcattcctcaacgtcatcgattggagtagatcaatgggcttgaagcttcgaaacaggttcaacgaatatttaacacccttgaaagagcagtagcgtttgcatgcctcctttacctgagcctgaattcttcgaggttcttcttagggtcctgaattgaatgccaggcaatacaatggaagacacatgtgttattagtcttggagaaattgataacgtgatggttttcacgaataatcttagggatgaccgcatcactatccccaagagcatggttgcgatgatagatgtaaattctaaagccagtgatagacttgagcttgtatcctgagcttggatagttgagcttgtttgccaactccattaaacggatctcagagattactttcttacggatgtcagccttgctattgatagcaataggggtgttaaatacactcgtattggatatattcggatgccaatactgtgtcaaatcatcggttaagctcacaaggtcgtagccgagagcgatattaaccttgaaggcattcttttgactggtaagtacgttctcaagcttgtcgtagaactcagctggttggataccttcatatagatgagattccatctgcttaccgttataaaagcgatacttaggatcagccttatactcaggcgacatatgcttttttagatcttcaatggaaactttgtactgtttcgcaatcaaattctgattgctggggcgcgatagattgctaatatatgtcattctaccggttttaccccggatcttgactcgatagctactcccccatttgattgggtgaatatttaatcgctttagtccttctaactcgtatgcaaacatatttcctatatatatccgactatataatatcaggatagatcgactttataatttatggatcttatgtcagaatagatcgcctttatatctaccctgatacaaaattcaaaaaaattaattaaataattagctaagttcggtttcactgttaggttcgcactgcttcttcgctgcataggatttacgcttttgggcacgaatatgctcacgattcctcgcttcgtactccttctgcttagcgatacgagtttctctcgtcttcaagtagtatcgcttttgagctgccttaatgcgctctttgttagcttggtattgttcaggagagtaagtcatctttgtatattattaactttatatttatcagaaaaaaaaattattaatgcagcatgccaaagcaagaattagctgaaataacttaacgtgggaatagatcgagtgacctgtctagccacagcacgcgccatgtccaagtcggggcctaaacaactggcgatgtcatagtatcgttcgatgctctcacgaatcccgccactttcactggactcgctgatggacggcaacacccgggataacttctggcgcttcacagggtcttgaagcactggggtcatgatatccgtaggcttcagtagctgcctgatcaactcgaaagcttcacctggattcgtaatgttcactttgttgacgcaagtggtattgttttccttcccggcgacccagaagaatcgccaatcgccgttgaagtcagtaagcagtgcaaccactgggtcgtcggcaagcagagccagagcaattagctctgacatcgcctggaagacagattgtctttcaacctttttcttcacttcaatcagcatcttcacttcaggcaagtccagcgcataatccgcgctctccatgacgatatcactgagtatgagaagagcggtgcgaccccggagctcaatgttggagccgttgacaacaactcggagaatatctgtcgtattttccacaccgaacacacaaagcttctcctcctggagaagctcgccaatgttgctgtcaacatactcgcgatattcatctttctgcttctcctcgctgagtttcatgtcccatgtgaaccccttgacttcaccccacttagcagcagctttacgcacaggttgcaccttaatgttgaaggcgtccagaagttccttgtactcggtcgaacccaccttcgagtggacatatgtcttgcgcttggtcagcacagtttgcgcatgaatttcgtgcacctcttggaccacttgatccatcctggaagtctcgctcgctgaaccaactgccccctccggaaccaccaccagcacgtggatttgtctcgactttggagcgcgccctttccgtttggtcatattgttagctgtcaacacgtcctcaattgtccacgtagccttcatcttctcgccatcgatcaccgtttgaatgtcttgatgcgtctttccttcttccaactccagcgtagcaggatcgtcatctttcagccacgcgccgtccttcttcgccaggaagagctgcagcttgtctgcttctcccttgatcgtgtcgggcttcctcgccttaatcgcgtccttcaagtcatccaccgagtcactctcgtccactcgcaccgagaacgcgcttccagccacgccaacgatagcacagaaaagcttgaccatctttccaccaggcggcagattctcgaatgagagagaaggggagggagagattttggtaccgtacctaagcgggaaacgaaggcgtgatgaagcggtgtcacaaaagagccctattccaataccgagaggacttgaaagctccatcggatgcgtcctttcactctcagcagtcgagaggtgttgtcgttgaaatgatcatttgatgcgtgtgaggttggtgttgctatatgtggtgcttgtaggtgaggaggagacctccttcgcaccagaaggtacttattggttccatcgtcgaaaattacctccttttccctctttcgcggagaacgttctacgattgttctcgttggtaaattacggggagaaaaaaaactgactgggttttgtgctggaactcactacttttagcgatcttactagacttcaaactacatgtaccgtagtggtagactcgcacttttgcttttgcacctcgccccacaagccgacctcctcccccactccacccatttgacagcgctgttgtggtgcgaggatgcctggtcaaaggttagtgcttcgaccatacgccactgttggaatcattccggactcgtaggtaaagctgctcttcagttcattttgaaataactaaatcagtacattgaaaaagtgtactcgacttaacatcaattgatatattctgcgtctttatatatatcaggcgttccttactcgggcagattactgtatctagttaatcaaccttttcttcttcttctggggcaattgatgattacgagcgaccgtcaacatgactccaaacggggtactgtagacctctgagatataaatcctaacacgacgtaatgggtattgtctcgcgttatcttgttgcctgcgttatttgtttgtcagtacggtagtgtgtaggtatgtttcggcgcaggcatggagtgaggtttacaccaagaacgtggcaacccatttattttgtgagtacggtacatgcatcctagactaccacatgaaatctacgctgcctgtaaccccgcaaacatcgcatcgcggtagtgttccatcagccactggaagatctcggacatgagcagatcgtctttcgtcattactaccttgcaaccttcatctcgcacccggtgcagcagcagcatgacctcgaagtgtcggccaagagctgcgttgcctattgccagcgctgtgcaaccctcacgacgattctcatggagccaccgaacaactgataagtggccattcctcgcagcatcgtccatggcgctggtcgtgctaccttctgaccgattgctgtgtagccacttgacgacttcgaggtggccagaggctgccgccccatccattgcgtctgtcgtgcagccttcatcccggtgttcatgaagccatttgacgacgtgtaggtgtcctccccttgcagcgagatccatagcctcagaagtgcagccttcgctccgattatcatgcaaccactcgacgacgtgtaggtgtccttgcctcgctgcatgaaccatggcatgcgtagtacagccttcggatctgtggtcatgcagccattgaaccacatccaggtgcccccgcatcgctgcaaagtccatcgcgacagatgaacagccttcttttcggtttctgtgaagccactgaaccacagagagatagcctccaagtgctgcctcatccatcgcatcctctgtacaaccttccattcggtgattgtgaagccagcacacgacgtcgagatgtccatggctagcagctgcatccatcgcctccgtcgtgcagccttcagtcctgttgttgtgaaggtagcaaactacgtccaagtgtccgttgctggcggctttgtccatggcagcagtcgtgcatcctggcacgctcgactgttccacctcaaactcccaatcaggatcactgtagtcaatgttagagagctcctcacgcttggctttctcttcaggtgtcaccagtttacacatcttatccagatacttcacgatacccaagtgtccgtgttctgctgcagcatcaagtacgctgaagtatgtgtcctcatcctcatcatagttccaaaacaagttgatcgccaggttcttcgagtactctgtgtagaaccacttcactgcatctagtcgaccgttgatcaccagctccagcatgattccacttcggggcttgtcactgatattagcggggccgatgtcacgatgtaaccactcgatcagtttccaccgtctcacgcgctctttcgcgttgaaagagggcttcagcggcttttccgcgcgagaaaagaggtactgggcaatgtcatgatgaccattgagcaaagcagcctcaattgcgagggtagcttctccaccaacactcgtaaccctgattgggccaagactggctagtaaatccaactgcgtcatgccggaatagtcttcctcttcatcttcagactcacttgcagtcttcatcccttcgtcttcgtcctcatcctccccaacttcatcttcatcgtcgctatcaaattctcgctcgacaagccagcgaacgatatcgacatgacctttctccgccgctcgaatgagtctacccgtgtcaaagtgagacccgaaacactcttcgtccatccaccgcaccatctccgagtgtccattagcagcggcgtcctgcatccccttttcaggcacatcgtcaagtttcgccatcagccacttgaccaactccacgtcgccggaacccaccgcagccttgaacgtctcgccgtcgtctctttcatcacttcccgcgtgttcgtacagccacttgacgacgtccttgtgaccagccgcagccgctttggcagcgtcgcactcgccccagccgatggctcgtttaggagtcacctcctccatctccttgtccctgtccgaatcgtagtttggtagctcaccgccctcatctttctccttcaggtactgcagaatatccagcgcccccacctccgccgctttggtcaccactgtgccccacactgtttcaccgggaaaatgctccatcaaccacgtgaccatctcgaagtctcgacgctctattgcctccaacatggaatacgtgaactggcaggcgcggtacctcctctctgtgcgtaatagtttccgaatggaccaggacgcgtattgcccattcacggggtcaatcgaactgttccagattcgatccaatagggggatggacccgaacgtgcaggccttcacaatgggcagctggacggaggagtcgaggtacgcggacacggagttcaccacatgcggtaggcagccgaagtcgggcttggaccggaagagaagcgtcaccaccagcagtggggtcggagcgggagacgccatggggaagtgaagtttgaggttgcagccaatcagagtcgtgactctcatttatattgtaccccgtttattccgatttaaatgctaatatttgaaacagcaagtatcgctattaccagcagttatggagagtactgtaaacgttccaaattatgataccctggcgaagatgtcgctttgtaccgtgtgatggagcgccgttcgcacgaccgtcgtacaacattaaatgctcaagaagatcagttgaacagagccatgtgctaagggcctggtcggggaatgatcgtctcagtctcgctcgtctccggtaagcctacgcctaaggtgaaccaagccgatgtggtcggttggctggagaccgtcttagttttggtgtgtcaagctgctcgactcagcaccatcacactcgagaactcgcagccatggaaggcacccttactgctcaagcaaccttctcctcaaaagagtgctccttcataaatcgatctagctcaaaatctttcagctcctgacgcagaacaccacaaagccgtagaaacgtagcttggctacacctgagattctgtcgaaaccactcgtcgtagaccgcgtcgtaaagcatagcctcaaactctagcggtgtcagggtaaggatgttctgctttgggttcgaaattgcccacacagtggtgtggaccgccgtcgcgagagcccccgtggccgcagcaactgcagcaacgatgctttcgctctgcaccatcgaaacgcagtgaagatgctcgtctccaaagtgagactggtggtttagttggtcagtctggagacgatgaacctagccgatcgagctaataactggccaatcaaaaataagaaaaaatgttgccacatcgtctaagacgatcgaaagccgagacgagcgttccccgaccaggccctaagtgccgttttgttcatgaagcaaccttctcgttttcaggcgagttcctcagacaagccccatcccatagagaacggtagaggtctcgtcaatttgcaaaacgatctctccatgatggaagacgagcccgtgcctctcgttgtggtggacctgctgtttcgctccaagggggctttcaccgacctccccttcgtgatcaacctcgtgtcgctgtttctggatttatcggtggagcttcccctccacaaagcatgccaacgcggctctctcgagcttctggagcgcatgtggggcgccagcgagaagtttgtcaacaatttcgactacaatgaagcctggacgctgcgcaaatacattcgcacagacccacactatcggcagttccagttcacgaagtctctgacggaggcaactcgcctcaagaacgtggagatggtcacgtggttagcagagagattccaggggttcactgtgaaagagagcgtggttacggaagctgcacgcgttgggtctattgagattcttcggctcttccgtgactatgacaacagctcggccgatccaagcatccgagacgccggcgttgggcttaaagtcgaatggactagccaacacgctctggcggcggcacaaaatggtcacgggcgcgttatctggtggctacagttcaaatgcggctatatagatgtgcgggctaggaccgctgctttggatgcagtgataatcaatggcgacatcgtgttggccgagtggttgttaggccattcgacgccgtgggctcagcacgatggggaccttcacccactgcaccacgcttccgccactggggacctggatgtgctggagtggatcttcaaaaataccaattttgtcgtgtacgttggcctggtggcggtagcggcagcaggggggcacctcaatgtcgttcgctggctgattgatcgtgacaccgacactgcccgcggtaccgcaggctacgtgccataccacgctcagccgcgtagaagccatgttaaactcactggtctgggtggggaggccagtcttgctatccacgctgcagctgtgaatgggcatctccaagttgcaaagtatctccgtgctcaggctcaaatgccatggatagtcttcagcgcacccaggcggtcatggagcaaatccgccagctctagaatatttcgagagtgtgtggtgagaaggttgacgccgctgttgtttctgggaagaccatggcgctggtagcggcaaacggacatctcgacgtcgtgaagtggctctgtgcggagtatgggaacgacccggacatcaaactctttgaaacagatcctagtggatcgacggtgacagatgctgctgctaccaatggacaactacatgtgctgcactatttgcatttactggaagcgtccgtgtccttgacctcaacgcctagaaagcgcaaaagaggccaggtagctgatcagcctaacagcccgaaatacacgaaagctgccatggatggagcggctgggaatggccacttggcggtcgtgcaatggcttcaccaacaccgaagtgaaggttgttctacgagtgccatggacgtcgcagctacgaacggccacttggacgtggtgcagtggttgagtgcgaatcgagaggaaggatgcaccactgaggctatggatggcgctgcgaggaatggtcatctcctagttgtcgactttctccacgatggcttgaatggttgtacgactagggccatggatacagcagcaagcaacggacatcttgccgtcgtagaatggctaagtgactaccgattcgagggatgtacgactgatgctatggatgaagcagctgaagggggtcatttggatgttgtaaaatggctacaccgtagtcgtaccgaaggctgcacggttaaagcaatggatagcgcggcgaaacaaggtcatcttggagtggtccagtggctccacgcgcaccgctccgaaggatactcacgaggggcgattgctggtgctgcggaaaaggggaactttgaggtggcgatatttctgcaatcgcagtgtcgttggcagtgtacggaggacgtgtggttttcggcgcttgaaagctccagtccagagctggcgacgtggatccgagagcattatccacggacggcgcagtacgacccctagttctttggtgtcacgatattatcgactacaaacacatagagcgcgaaaatgggtaacgatctgccaactttgtggagatcaagctgcagtaagccgtgtgacccgcgtgcaacgcagtcatctggatgaagttaaagatgtaggaagcgatgtgcttgaagttagatgttgaagttacaggcaccaaggactagaattgcttaggaggaataggacgaatgtgctaaactcaatctcagtttcgattttccggcggcatcgggagccgtacttcctctctaagtgctattgccgtttgcagatattttggccaacgcatgcttattatctcgttaataatctcgatttccgtctagcaagctcttaattgagacctaggactgatttatatatctcgccagtacaggtctaagatgcaaggttggggtctgtttcacgctttgctacgacttggaaacgcagaaatgccattctagacgggccaaaccgagtttctaggcctaaaagcggcccccaccaaagtataaagctaaatcatccttcgcctatctcgtgtccactcatattaagagacaggcgtggtctattttagaggtctattttaaaaggcaaagtatttgcaagcggcaataccatatcacttgtcactcttttttaaatgttgtgacatttggggcgtaatcgatgcagttttgataagaagactgttgaaggaagcgccgtgacacatttcatgtagctccatctagctaaggcgcctcacttatttcaataagaaaaaaataagtttgataatctaagattccaaacttgtcgctaatttaaaaaaactaaaaaatattagcgacaagtttggaatcttagattatcaaacttacaaaagttgaaaactattgtcatcattgacccttcagtttggcagcaattattttcacaacttggtcgttcttcgacgtcgtgagcatcatcgctagatctttgtcgttgttgtgagacttcacaatcgagaacatcacgtcgtccgcgttctccttatccagcctaacgacgtacgagacccacgtactgaaatgaggcctgtcgaaaaggttccgccgccagtcattaagatacagcagttcgaacacatcatcggcagttcgttcttggcttaaccaaagctctcccctcagcctctcagcaactgccttggcgtgtatcttgtcgattgccgcaaccagcatatcgtcgagctttttgtcaccgaagcgtcctcttaggaccgcgatcatggtttggtaggggttctccttttccaacttggtaacataagagacccaggtgtttaccgccggaacttcgaagatgaacctgtgatatcttttcagtaaaaagtcgaaagcatcgtccgcagtttttccttcatgaacccacttgtccagcataatccgctcgagttttgcgttaacgtccttgagattgccagtagagcgccctcccagtgcttcatcagaatagtatggctttaacactgatagtatcacgacgtctgcgtccttagggtgctgctccgtcacataggccatccaagtcctcactctcgggtgcctcaaaaggaaagcttccgcgttttctagcttcaacagcttaaacacatcacttgcggactttttccgccagtgttcgatctgggatacgatcaaattgagagcaatcatgcctgaagtgtcaccgtccgtcgctgtaagactcttttttgcgagcttgtcgtccgtgtctggggaccttttgagcttcgccagcagtaacgagaacggattttccttcagcttgtcagcgtacgccatgcacgtaggcaacaatggattcgccagaacatcgtcgacctcatctccaagcttgaagagcgtaaaaatgtcatcggcagatttgccgtcacttttccaacgtgaaagatgcgggtcttccagtttggtcgtgatgatcttcacctcgtcgtccaccctcgccgcagcaagcattttcgctatagtgtagtcgtcaaagtatgctgttagagttgaaagcatcgacttgccagggcttccatccagcaaattcgcgtacgaactccatgctaccactgcggggacctcgaacagtttgtcgccttgtttgtccagcttcagtagagtgaagatgtcgtcgagagttttcccctccttcagccataattgcagttgcaccccctccatcctcttggcaacatctcccctcaagaaccctttcgaccgcgctagtatcagagccaagtcttgctcgctgtagcttctcttcagtatcacgaacatttgctcatcggcattcgtctcgtccagcttcgtgacgtacgagacccaaggattgttgaggatgttttcgtccgcgctattgggttttagaagcttgaaagcgtcgtcagctgatagagccttgcgcatccacttgtcgagctggacttcctccacttttcgagcaagaggagccaccctttcggttgcctgggccgaagcgagtgcagttagagccgcgtcgtcagtatactgtgtcttcatcttcgccagcaagagctcgtacgggttcggcttttctggtagcatcttcacgtacgacacccacgttttcaacagtggactccacagaagactgagtttctccttctcgagtttcagcacccggaacacgtagtccgcggttactccactggccagccagttcttcatctgtgtctctctaatctagccgcaatagtcgtcgtactcggcacttccttcaccgcactagacagcgcttcgtcgctcagtttagctgtcaaagtcgacgcgatagccatttcagcaccttcagggttcttcttgtatagtgcggccaccgcgctcgcccatttctcaaatcaagaagcttcgacctgtcagagacgtcgaaaagtttaaacttggagaagagctgggacactttctcttcggtgcattttttcttgacgagattctgtgtgactgcagagatcttccccgccccgtctacaattggctgaacggcgaatcgcctcggccagacctttcagcttttcaatgccggatagagtgactcggttttccaggtcttcatcgtccagacgctcggtttcttcgaaatacgccctcaggttcctcttaacctggacgatagttagatccgttctctgaacttgttcagtcgtcgagtaggaggtgacatctgaagctccgcagcgagataccagtagattgaatgcacacgcaaccaggagcagaacagagcaggcgtatcgcccagttgacttactagacgaagccatactcgctcttcgcgctcaagcgcaagtgagcaaatgatcaaagaggactggaatcggcgaatgatcgtgataccagttgccactagcagagctcgtgatattcacgcaatcttgccatatcgaattggggctgcgccattaaaactttcacaaaccgtgagttcgaccttgcaagctcgctagatttcgctacttatctgtgtttgagtgttcatcaaattgtctgtattgaactaccactacaataaaaaactgacataaactccaagcatattaccccattgtttttttttcttccatttttacggggctattgctggcaacatcctgcagatagcagcgccccacatactatctcacgcaatcgccgcatattcaccaatctatcttaaacgaatctggccactatcaagaaaaaaatactgagacctcttatcaaaaagtctattttcttcttcacaattagttctgtggcggttcgaggccagggtaatgttcggccagccattcgtatatatttttcgtgagcgcgtcgtcggtgttcacaaaagctgttcgtgtgggaccttcccggcgacaacaatgcaggaacagcactaaatcgaaattgttttccgtcgctgccgcatccattgcagcagtcgtacacccctcattacggttgaaatggggccactggacgctgtcggtgtgacttttttccgctgttgcatccatagcagcggtcgtgcagccttccgatcgattactatgtagccactttacaacagtcaagttcccaccacgcgctgctgcgtccatagcgtcagcagtgcagcctttagtccgatgctcatgaagccacttcacaacctccgaatagccctctccagcagctccatccatcacttgcgtcgtacagctcgccttttgatcgtgtagccatttcaccacgtcgaggcgtccgttctaagcagcgaggtccatggtgccagctttaaattcatgagctcggtgttcttgtagccattgcaccatctccaaatgtccgttgattgctgcgaggtgcactgcttgttccgtgaagccctccttccgattttgatgtagccattccaccacttgcaggtaattattaccagcagccaaatctatcgctgcggtcgagcatgttggacctgtaccgctcattgtcccgcctctcttgcgcttcttctggtcattctctttgaacagcacagaaatctgatgcaaatacttgataacgccgagatgaccatacttggcagccgtgtccatcacatggatctcgcccgggtcctcccactcctgtcgcgttatactcttgaatagatcgatgtcttctgcatcagcgaaggtttcgtagagccactgaacgcaatccagatgcccttccgccgcattgtacgcgccgtgatccaggtcgagtcgtccgaggggggatcggaatgcgaaaaaaaatgggtggggtcgcacgcgtctgtgccgataatggttgtagagatgcttcgccagctcgagacgtcccctgcgaaacaaaccacgcaacagagcggccgaccttcaccatattccgctcgagaagccactcgaagacttccagattgtccacgccaactagttggtcagagtagccatgttcgtacatccagttcaaaatgtcaatgcgacccgtgtttaccgctaccttcatcgcatcaggcacatatcttggaccaaatgcataggtttgatggacccactcgaccatcatcatgtcctcgttcttcactgcaatgttcacgcgtcacagccagcaacggaggtcatcgtcatcgtttctcgacaaatggattaaatctgcatcatggctacatccatgtggaccacatggcgttcgaattttagtccagtttagttttcctgtcacaaaacaatttggtgtggaacctgataatgatacactaccaggttgcgccgatgctggcggcggcgctgctgttcgagtccaaggaggctttcgttggcctctcgcgcgtcttcaccgccatgtcgctctatctggactctgcggtggagctgcctctccgcaaggcgtgcagactggggtctctcaagcttctggatcgcatttgggacagcagtgaggctttcgtggataaaactcccacaacttcggaagcttcggataaaactttcacactccgtaaattcatccgcaccgacaagttttaccgccaataccagttcgctctgtccatggaggaggcggtgaagcagaagagcctggagatggtcaagtggctgagcgcgaggttccagggctacactgtgcctgaagaagtggggaagatagcggtcagggaggattcgagggacattatcgagtttttactggagattgatataagctcggggggagacgcagtgcaaggttctggaggtatggggctccgagtcgagtgatccgctgatctcattgaaagtgccatctcgaatcgccggagcgacgtggcgtggtggctgcggagcaagaggccgcgtcttcaccaagatttggactatgctctgaacgccgccgtggataagggcgacgttatcatggccgagtggttgatcaagaatggggctcattggtggcacgatgaaggggacgatttattcgtcgaacaccatgctgctgccaatggacacctggaagtgctgcagtggctggatcagctgcgtcgaattgacggcactgggggattgctcacggttgctgcgaacaagagacacatccacatagtgcgttgggtcatcgagcgtgacttccgcaatagtcacaacgccaacaacctggcttgtttgggtggagaggcgagtgttgcgatccactcatccgcagttaacggtcatctggagaccgaagcgaaggttgcacgacgggcgcgatggacgctcctgcggctaacggccattttcgagttgtggaatggctacatgagcacaatgcagtgggatgtactgaagatgctctcattggtgcagctaggaaaggtgcttttgagatcttcctgatcttacatttccagtgtaatgtgcaatggtcggacgcgacacagagagcgacgagaatgagccccccaagtgcaattcgcctctggattgcggcccgtgaccccacttttgcggactagcctggtgaacctagcctgagatgacggttctgctgaattggagtgttgtctggtgtcctggatcttatattctacacgatttccaaccttggcctttaggtttgggacgaattaatcaatgaaaaaaagactttcgttgcttcatgctaagtactatgctgtagtttcatagcctagtagtcagtaccaacgcatcgcaaatgtcgtagctctagaaggcttaaaggaaaatattgggctcataaatcaatctcatttcttggtcctagtagaacccaaatattgtattgtattgtactgtactaagtaaacgtttagtgcgccttgcgcttagggaagaagtgatctacactcttcaaacgtagtccagaatccaaatgatgaaaacaaaaacgagttaacagtaaacttcgattgattactacagtaccataatacctcgccgtgatcaataccgtacgtacatgtacatctactgtccattcaaactgcagcactatggcgtaaacaatggcacctcgatcttgattctatatatatgatctcatcgcgctccattgttcgtagtaaggtaaataccccatcgtcgagcagatttcgcaataacgatctggtcgtgctccattatttgtatggtaaatacaacctccaggtcatcgtcctcttctgggctgtggggtgaaaataagtagggcggctcactctcaattttgggtcgcataatctggtacttcagtgcattcgaagtgtgcgtgtactttttttagcaaagctttagtattatctttgatgatgatgaggtatattggattacttaaacgaatccttacagccgagccgatcaaaagaccagcaactcggcacgatctagatctgctgacgtctgccacccaggctttgggctgccatgcccgtgtccagttgcgcctgcgcaagcatgtagatgtcttgtcgtatagcctgctccagtgaggggaggcttttcgcgaagtgtcttgctgcgttcggtggaattttggttacttcggggaccagaggagtcgaaccagccaattctgctcgcctaagtatagctccagctattcgcacgatggggctgcacgagagcgcccatatctccgtcattttggcactcatagcaataagttctgtttcgaaggcaagttgaaacctccttccgtttggggaagttccgctgctattccacctagccatccttttactttcccgactggttttgcaaatgaacttctccagacaaagttccgtatccggctgctagtttcgatgaggatcttcttagttggccacgcgtgtttggccacaaatctcagcttgggcaagattaaagcgtttgccagttcggcccgctaggtgaccgagtttgttttcgcaaaagcaagtgctaacctgctggtcagtgctccaaaacctctgtcccaacccttcttcacatctcggagccatcgcagtgaaaacatagataaaacgcagatgaaaaatgtttttacacggtaaattatgttttgttttgttacagtaaaataaaatatgggaaattgcaatttggtcaggagtttggcttggaatttgcaattcggtcaggtgtttgctaggacttccgaaagttagaatttagactgtcctaagtttaagagttagaacgttccagcttggtactgagcaccatgctggactgtgtccgctgcacgtttgctctcggctagcaaacgtaacatcatacagcagaaccgtgggacttgctctccaaatgaccaaccggccgtcaaaacgttggggtaataggcagatctgtgcttgctcgtgggtcctcagagaggccctgtaaattgtaagttcatggcatgtagcgactcgtagggcccgtcatttggctttgtctaggttagcggttagcgcaaggactacctcctgatccgggaggtagttcgggagccccgaactaacagagcacgatgtggagcaccagacgcacaagcaccttggaagaattggccccctcagttggtgtccgtccttcagatctggcgtgccaattctaactttcgaactgattagcaaacacctgaccgaattgcaaattccaaacacctgaccaaattgcaacttccccaataaaaaataatttatcgtattttctgactagtggtcaacaatggtggcgccgctactggccgtagagctgctcttccgctccaagggcggcttctccaacctgccgcacgtgatcagcagcgtctcgctcttcctggactcgtcggtggagctctcgcattccgaggcgtgcaagctggcctccatcaagctgctcgaccgcatttggggcagcagcgcagttttcgctaattttgacacaagatttccagttgggccatttactatccggaaattcatccgaacggacaagcactaccgccaacaccagttcactttttcgatgttgttcatcgtcaagaagaacaatctcgagatggctcgctgattcgccgacaagttccaaggctgcagagttatcatggacgtggtgatggccgcggctgaagctggggccatggaaattcttcagctattctatgaccaagacaacagctctttggacgtattattgcgggacaaaatgggtcttcgagtgaactggactggcgccgccctgtcaagtgcagcttcggctggccacggcaacgtcgtgtggtggctctacacgaaaattacgtcggacggaaacgcggtgggcagggcgctagaggcggtgtttccggcttagtcagattgtgaagaatgatccaataagatcaaaacattttttcctcaaaaatggtctagcaaaggcatcctgtaccgatgctagtgtactccgcaaagatattagtgattttcacaacataataatccactgtaagtgctgtttgcaattccgtgtgtatgtttgctgctctatcagtagcaagtcaaagtaatggctcctaaagaggactctcacgcgttgtcgaatccataatccatgtacgcaccacgccgtagtcagagtgatctagtttatcgttggttagcttacaacaagtggaaagagattcagccctttttagttagcgccttcaagatgaatagttaaaaacggtctaactccaaacatgttagccagatttactacgtgtactccctaacgctgacatgttagttgctatacatggtagctaactattagttagtgtctagtattttgagctaacatgttagtagtgtaagagcaaaagtatggagaagagtatatgcttgcaccgaaggcagccgagaagggagatgtatcaaactgaacacaaatacaccctcaaaactaagaatttaccatccaatctataatactttgaagaatctgctaacatagggaaacatttgctgggaggagctcacatggggggggctggcacaccacttatcagcgcagacgatgaccgattttaagagtgaagacgacttaggtgcctcctacctatgtcaaagtccgcggtgcaatatagacacccagaccagctagtaaatatgctttcgtacagattactaagtaatctcctcaggtacccatttcctccactatacagtgtagctgacatgtgtagttttcaactaactgttagttagtgtccagtagaatcagcatgttagtggagtacactagcactaactaaccgtttgcaagcgctagtgttagatatacggttagggtttgtgcgaacactgatcgatgcggtcaaatgtttcaaggtccgtgatgagtagtgacctcatacacagttcagtgcatcccatcggtagcccagctgtgatcgctaagaaccgaaatatcaattcgcatacttggtttccctttactgtcagccagccactagctcattcaacctgtcattccgcagctttcagcgctcccccaactctccaaccggaatggacgcccacgttctcattccacctaacgctctaacgctgagtgacgagctcatctgcgacgttagacagcgtacaggggcctctcgagtcaactcgacagctgaagccatccaagcgacatggggagaggccaacaccaacgtgtccgtggctgtaaatgtcgtggcgtcagcgacagagcaaaccgcccatcgcacttcactatcggctcgtagtcgtcgatcctgtctccgttccgacctgaagacagcgaggaaggtcttatctactatcaaggcggccaaccacccgatcggcgtcgagctgcagcacgcaatcgtcaccgaggcgctgaaaaagaagattcgccaccgagaacgctgccgtgtgacccaggctcgccaaagagagaggcaactcgagctcgaagctgatattcaacatgccattgagaggttgtggaaagagatcgaagatctagaagcgaagtgcaacgatccttcccggttaccagcatctccgactccatggggcgttgtgggcgactacttccgtcacttcaactacttcttagcgcgtcctgggactggatacgacgctgcgtcggagttcttgcgtggaatcatggccccagacgtggtcgatggctccgtatgtggagtggacgcacggagtgagaactggaggcgcttcgctctctactttggcaatgctcacattgagcttcgaggtatgaagatgccatctcagcacacattggtcgctgacataacaactacagtgactgttacttggaataccctacagttcgcgttcccgcacctgaactccgacgcgaagggcgggactcaaggaggtgcttggtcgcccattgctagcagaatcatcggtcggcagcttctcgcgcacgggtcgatgcactttggctgggatgatacgagcgacaaagtggtgagattccagatgcggatggatctgctgactccgatgctcaatctgctgggcaatctggaagatgtattgctcgtcttcagcaaggcttccatcaccccggacgatacgtttgttaggtagtaggaatctccggtcatgtgggttatttacgatcatactctgtttttgatttctttctgtaaggaatgaacatatttgcaccgtcaaactcaactgaagttggtagcaaaggctcgagaaaaacaagcaagataacgtccccaatataatccgcggggagattcctcgcagaaattcgatcgcgttttctcctctcctccttagtcgcccacacgttgaactacctgtaattggtcgccctccacaccagcatcttgctcctccacttacaatccttttcctcaaagtctgggccgaatcctggaatacgatgtttgtctcggaaccacttcagctccattacatctccgttgaatacgatttaatgcaacactatcttcattgcgcaaggcgcccaatgttcctgtagagctacagtacagaaccgaagtctggtacattccgataaccgcatctgctacatcatgataccccccccaagcatagcatgaactttgtcacccaggaatgcatctctcatgtgtcggcctccgactcgtcgtgttgaagcttgcagttctccctccacctcccatgacatgcagctgtgtgatacttacgtcaggactaatacatccgttggcccatttcaactggatacggctctaattcgggcaggaaattcttccggacgcggttcagcagacggatcaaggtgcgagtgcacaatttcatctccacatcggcgttcaggcgcggcggtgagtacgccggcatagttggtgtctggagtggaacgtgtctaattctcacacgtcacagacatcttatcacacgtcacagatttcaatcggaaaatgggccagacgcaaatatttgcgcacggacaaacactacaaccggttccagttccgatgcggcgccatcgaaactgcgagcatcgaagagaaggacaagggcatggagatagtgcagtggttctacggccatttccacggctgtatcgtgcctttcggagctgtgagagcagctgcaggccacggacatttggagatgctgaaattcttcaaggaacatgaagttcctggaacgttgggcgaggatcgagacgatatcaaagctggagagggtcacgtggttcgctggggacgacatgacatggaggcggcggcggagaataaccacttcaacgttgtctggtggctgttcaagtacgcgcctgctcctcgcctcgctacttgaataacgtgatgaaaactgcgctacgaagcggaaatctgctgatgctcgagtggatccaagcgaagttccttgcgcgtcgacgccgcttaccggaagttgggcggattgcattaactgctgaattattggcgtcagatcggaaatatttcatggcggaagcgataaaaggaggacaagtcgttgtgatggagtggcttctggaaaatggacatgcgacaagaatggaccggcacagtgccatatatgcagctctcaaagcgaatcgccttgacatcctcgactggttgacagagcgtaaactggtggaagctggccgtgtgatggaggttgctgcgggggacgaccgtcttgatgtggccaaagactactacgcttggtactggcacgagatatgcgcgcagcctgatttccctatggagccctcagtgccgagtcggaagtcgctgtggatcagtgcgggtaccatgatttgtgccgtgagaagcggtcgactggatgctgtacggtggctcttcgacacgtttaattgtgcagtgaactttttcgcccaattattcgccgagggatatactttacgtcgcttcggaaggtggcaacctcgagctcgtaaaatacctgcatggtattattactctgttcacgtagaacacgggtagaaagcggaaacgcggcaagacgatgtctggggttgggccggagtgttcaacagctgcgatggactatccagttttatttaatcatctgcctgtagtgcaatggctccacgcgaaccgcaaggaaggctgtactgccgaggcactagagtttgcagcgaggcacggatacttggagatattacagtggctgcacttacatcggcccggcggctggtcaactaatgtgatggatacggccgcatcaaacgggcatttacacgttgtacagtggctccacgcgcatcgaagagaaggatgcacgaccagagcgatggactacgctgctatggacggacatatggacgttgttcagtggttgcatcacaatcgaagtgaaggctgcactgtcaacgcggtgacccaagccattattcagggcaagatgcacgtggtgaaatggcttctggcgaatcgatctgaaggctgttcatcgagtgcaatggattttgcagcgatgaagagtttggagattgttcgctggttccatgaacaccgcagcgaggggtgcacgagtgctgcaatcgataacgcggctgggtgcggagaattcgatgtcattttgtttctccatagtcaacgacgcgaaggctgctcggaagatgtgttccgcgaatccgccaagagcgacctgttcgacaacttgagatatgcggtagacgattcaccttctgacaacatctacgactggctggtcgaacactacccagacgccagagatgagtagtcagcgttgagcgtgcgtggtggaagaatgtgtgcgtcctaagctcctagcgtcgtaatgctcaataaaatagtccgcatttaaatatggtccctataaaaacattaaaatagtcgtgtcaaaatatttgtgattttagtaaccattatctgaatgacggcggtgacgctgttgttccgctccaaggtggagttcctctcgctcccccaccttgtcaacagcgtctccctcttcctggactcttctatggagctccccctccacagagcgtgccgatttgggtccttcagactgcttgaccgaatctggaacagtagccaagttttcgtcgatgatcccgggcgcgcaaaggaccaaatttggactctccagaaatacatccccacagaccgccactaccgagcgtaccagttcaatctgtgcctgttggaggctatcaagctcaaaaatctggaaatggtcaagtggatttctcgtcggttccaaggctgcctggtctcgaagaatgttgttgcccgcgctgtcgacttgggactaatggccattttgatgttcttccgcgacgttgatacggggacggacgccccgtggtatacgccgggcaacagtcgaactccaggtgtggggcatcgaatcgagtggcagtgggcgagcaaatgtgcggcctccaatcgccgtagcgacattgtgtggtggcttcatcgatacgtccgctatagtcaacacgacatgagtgaagcactgacaaaggcagtggcgaacggggatattacgttggcaactatgcgatggacggagctgctgctgcaggccacctcgacgtcctgaagtggcttcaccgtaaccgaatggaggggtgtactacgcgtgcaatggatgctgctgcgagaaacggacacctcgaagttgtccaatggatacatgaacaccgatctgaaggctgctcgcagacagaggcgatggatagcgctgcaaccaatggacacctggacattgtgaagtggctgcatcgtaatacgaaggctcgttgttcaacgaaggcgatggatgaagctgccaccaatggacatttgaatgtcgtgcaatggctgtatgccaacacgaacgctggttgcactgcgaaagcgatcgatggagccgcgacgaatggacacctggggattgtcaaatggctacatgcttgtcgcaccgaggggtgcacagttacagcaatggatggtgctgccgagaatggatttttgcccgtcgtgagatggctgcacaggaatcgcaatgaaggttgttccgagaaagctatgactcgagcggcatacaatggacatctgcccatagtagagtggctccacgtccacagatcacaggagtgctcagtcccagctatcgaagaagctgcattgtgcaataactttgaggtggtattgttcttgcactaccagcgccacgagaaatacacgtctaaaatcgcggtgcaatcttacgaaaatgggagtccagagatccatgagtggattatccagcgctatccagaatatcgggaggcagttgaagcagaacatggtcaggactaaagtggccactacgcatttggtaaccacaaacgaaacacaaaaaatagttatcccacagcttgcgtacagctagtgcagttttggaagactatactgcaagtgcaccactgaatttgccgtctgctgttgatgcgggacttagacttccgaacagccgacgaagatctcacttggaatcaagctcgcaagtccttcatctattatactacagttgctaagtactgtactatgtaaataaaaaacaattatggcgacagtgtggttcccgtgctgacttcgattgctacttgttcggcgatgcgatcgaagcgtgagtgtatttgcttagcatttagcggacccttccgtccacatgatgtatatgaatatgtcgagagctctaaactcggtaaggaacgaaagatccccacgcaaccttaccgcggaacctaaatgcgacaaggttgtacacgtacactcaatagtggcgggcaaatattacacggctggtcagttcaagccggaagggacaatatataactaaagaatcatgcagcctatgttcaacgacggcaactgcagtcttgccctacaattgtcgggcttcggggtagagctcacaacgccaatcagaaatgttgttgccagcgtcgtctttgaatacagtgtgcatttgctcgaaaagatcccgtttgccatagaatgcttctgacgaacagccttcacagcgctgggaataaaacaaccacatcaaaaattatcccacccagcggcacgatccatcgtatcacttgtgaattcttcactgaggtgctcatggaaccatcgaacggtttccaacctttacaggctgcggagcttattgcactggacgaacagccttcaagtcgatttgtgagaagccacccatggtcgaaacggacggcttggtctaccgccttgacagtgcatccttcgctccggctgtgatgtagccactgcacaacatctaaatgacccatcatggcagccatatccatagcctcagtcgtacagtgagcgctagtgttctcgtgtagccaaatcaaaactttcaagtgtccgtcctgagcagcgccgtccatcgctgcggtcgtgcacccttccgctcgatgagtatagagccattgcaccacctctaagtgcccgtttgctgctgctcgatcaatcgctgtagttgtgcagccttctgaccgatgcgtatctagccatttcaacacctccaaatgtccgtttgctgctgctccatcaattgcacttgctgtgcagccttctgatcggtgcgcatgcagccacagcaccacctctaggaagccatacgctgcagcgtcatccattgccctcgtagtacagccttccttccgaacggtatgaagccactgcaccatatctaaacggttcttcgcagcagctttatccattgctgctggtgagcacgtcggaccgttcccacacattgtcttgctgcgtttccgctttcccctcgtgctccgattgaacagagtggcaacctcgtgcaagtacttcgcaatctccagtttgccgcttgctgatgcgacatcgattatatgcctagcgtaaaactcctccgccacaaacaggtccaccgcgtactggaacgtctcaaagagccattgcaccacgtccagtcgatcgccatgcacagctgcaatcatggtatccgtagtgatccacagcgggaagaggcgcggcccatgaacgttaaatatcgataaggatgtcgtcgggaatccagaatccgcacaaattttatgccagtagcaagtgtaaaagtcttttgcgacgtcaagatacccctcccgtgctgctatctccatcacgctgccagcttccaccaacttccgttcggttaaccagtccagagcatcaactcgacttgctttgagcgctgctaaaatggcgctagatcggtccattgctgccgcatagccattttccaacagccactccatcactacaggttgccctcctcctattgctttcaggcgacaagacatcagtaaatccgcgaacaccaacattgatctcacgcaagttgctttaatccactcgagcatcagcaagttcccatctcgtgctgcggagctcataaatccattcaagtagcgcggggcccgcccatgcttgtgtaaccaccaacaaatatggaaatgatttgttttccgccgccgcctccatgccatgccgtccccagcgaaccacgttgccctcattcgcctcaatttcgtctcgaccgtcgcccatctttccaggaatttcatgttccttgaagaatttcagcatctcaagaagggtaaattcaagttaatgggagggttctcttttcaacggaaaccctagctcgcgtcggctttgttagttagcgagaaggagtgttaaaagaccagaactcaggatttttagccaaaacacacaaatttgtaggcaagctgtggttttgtgctaccaatacccggttccctgttgtgaagtcttacttcgacgatgggatagatttaatgtcggtatcctatagcgtagtcttcgacgctagcgagttcgcagaaacggtagaatcctgactcagtttttgtattagcttcaccttagaatgcacttaacctttagtgttaagcggacccctagatgttgtccaatggatccatgaacaccggtccgaagactatcgcgctgcaaccaatggacacttggagctcgtgaagtgaatgcattgcaatacgaatgttggcagcaaactgcaacgatgagtactgaaagtcacggtatacgacggatatctgcaaatggtgatgaaaaccatttattttacggtatcctagcgtaaatgcagagatcttgctgttgcggcgtagaggtacctacctcatcgacaatattccgtaagacttcgcactcttcgtggtccccatattctgcttctatcgcagatcgatattcgggatagcgaggaagaacccgttcatgaatgtctgtctggactaccatttccgtattacggcaccgcgagttaccatctccaagtcatcgtaccatacatcttcttcgatatccgtactggatcatccctccagtctgtggaagtgaagcgcacacaatccgacgcagagagaccgttgagtagcgctgcagcacgagccctagtgcaggtcacgtaaatacatcacatagctcgcacggagggacggcggcaatagagatatgtacggttctaccagcttcatgcgtaaatgtatagatttttttgtaataaaagggaatttgagctagcattctttcatcaaatgaacctgaaatctggagtaatgagagccctgctgaagacgagcgacacaacctccaaactgcccagcagattcagcatcggggtcaacagatccatctgcatctggaatctcaccattttgtcgctcgtatcgtcccagccgaagagcgccgacccgtgcacgacaaggcgttggccgaggattcgtctagcgattggtgaccaagcacctccttgagtcccgcccttcccgtccgagttgaggtgtgggaacgcgaactgtagagtatcccaagtgatagtcactgtcgttgtcgtgccagcgaccaatgtgtgctgagccggcatcttcatacctcggagctccacctgagtattgccaaagtaaagggcaaagcgcctccagttttcaatctctgcgtccactccagatacagagccatcgaccacgtcatgagccatgacctggcgcaagaactcgaacgcgacttcgtgtcgacttccaggccgcgctaagacgtagttgaaatgacgaaagtagctgcctgcaacgccccatggggtcggcgacgttggcacccgggagggatcgttgcaccttgattgcagaccttggatctcatgccgcagcttggcaatggcattttggacggaagcttcgacctcgagttgcttcttcctgtagcgagcctggttcacacggcagcgttctcggtgacggatcttcttcttcagcgcttcggcgacgatggcgtgttgcatctcgacgtcaatctggtggttggccgccttgatagtagagatgatgttccttgctgtcttcaggtcggacgggaggcatgacctgcggctacgagtcgacgatgaagcgctatgggcaactcgcgctgttgcggggggaacagcagctgcagtcgctggaacgtcgacgttggtttcgccccgccttgcactggtgactttagccgttgagttgacccgagctcgtccagtacgctgcttgacgtcgcagatgagctcgtcactcagcgatagagcgttaggagggctgagaacgtgcaagtacatttccagtgggagctttggaggtacgccagaagttgtggaatggagactggaatgagatagtggctgcctgacagtgccaagttgtgcttgcggaacaccgggtccgtgacgtaatatttccgtacctagcaatcatagctgtgcgacctttttgatgaggtgaggtgcactgagttacagctcaccacgaccttaacagtggttggcaacacaaacgttgagtcgatactgtagcaaatacctttgtccaaataccagttgttttgctacagcgctttttttttctcttgccggtcatctgctcggactgtgactaaacaagctgcgctgtttagtcacgccactgtattgctcgaacttgacatggttggtgtttgcacacctgttggtaatttgactgttcgtacatgcagcagcactcatcttcggcccacctaaagaacgtgcagacactccgatttttaagttattggcatagttatattgcttggaatgtgtcattggtcattttcgtgtaagtagctagctgcattagctgtatcccgcttgaagtcggtttgctggagtgatatcttcgaaaattggctactgcatcaaaaaccaaaagaaaatactaataaaaacgccaagctttctatgctaaaatgtacttagtattggatctcgttgacaagagtcgtcgctgagttagttgaacgcttcttcatcctctactacatcctcgaatccaggatatcgctcgaggagccaagcgcgaatgtctacttcctctctgtcatcaatcgtcgctctcgcagcttcttcggagcactcgaccccgcattgcgaatgcagaaacaaaaccacctcgaagtagttgcatctaaccgcctcgtcaacgccaaaagtgactttgtgcttggaacagttcgaatacagccacttcagcagctttagcttgcctccttcagctgccttgttcatctcgcccttgcaggcacccggacgatttctatgaaaccacttgacgatatccagatgaccaaacattgctgcgccgtacattgccgtattcgtataatctgctgcacgttgctgatgcagccacttcacgatttcgagatgacccgctgtcgctgcatcactcatagccatcgcagtacagcccacagtggagtttttgtgaagccacttcaacataccacgctgtccattccgagccgcaccatccatagctgaagtagagcatccctctccacggttgacatccagccactgcactacattgaggtggtcgtttgccgctgttctatccatagccgcctaagtgcatccctccgagcggttgctatgaagccactggacaacttccaaatgtccattttcagctgcgccgtccatggcatccttcgtacaagccggggtacttttctgcttggtttggtctctcttgcgcttcttggaacttgcctgcattgcaagttggacttgatgcaggtacttgaccacgtctaggtgaccgttctgggcagcgctatccatcgctacgatgttggaaaaagtgtaccgcggttgggtttggtcgtaatcgaaaagatcaacttctggatcaggatcaaactcataatagagccactgcacaacgtcaaggtatccctttccagccgcctccgccatggtcttccacgaaattaacgccgatcggttataccgaccaagttgctgtctcaaatgctgaaataaacaccgctgcttctgagcctggagcgcatactgtaggcttgatggcgcctttgcttgtgctcgcaaatatttcgccacatgcaggtgcccattggcggcagcaacatggattgagagactggcttgacctcccagctccgtcattcggcccttggacgcatccctgctgttccgagtatcgcgctcgatcagccacctcacaacatccagatgtccaccctccgcagcattcgccacatatcctagcgccgtaccaagctgcttcttatcgtccagccatttcaaaacgtcgagtcgtccggttgccgcaagatggtggccagcacagagccctcgagggtcatttggccactccgcgccttgagatatcaaccactcagcaaccagcacgtccccattgaacacggcatagtgaaaggccctggcgaaattgtgctgtacattcggcaggtgctggaccagccaccaggcgacatcactatgacctgccgcgaccgctttcttcaagtgggcccccagtccacccgcacccccacgccttcaactcgaacattctcgtccagtgagctgttgtcgttgtcgtggaacaaccgcaacatctcgaccgagccgatgatacaggcctcagacaccacctcctgccgcacgacgcaaccctgaaatttgtccagcagccacttgaccatttccagatttttgtcatcgatggccacaaacagcgacttcgtaaactgaaattgcttgtagtgccggtcggtacgcagaaactttctcaacgtgaaatttccttttccttgttcgtaagtttcatcttcagcgtcgtcttctgccgcgatattgttcacgaacacttggctgctggcccagagtcggtcgagcagcgggatggagtcgcgcttgcacgccttgtgcaggggcagctccaccgacgagtccaggaagagagagacggcctcggtgacgtgcggcaggtccacgaactggcccttggagcggaacaggagccgcacggccagcaacggcgccagcttggcctcctcgtccattgttggtaatcgggaattacaatttagcaatgattgtagaagcaattgtcgggcacatcaatcgattattgagattctattcaatcattggttataagtgtaaccggttacataacctggtaaaccgaatctcctcaatgacgacccggagccgctgctggccgtgacgctggttttccggtccaaggccaagttcttctctcggtctcacgcggtggacgccgtctcgctcttcctggactcgtcggtggagctcccattcgatagggcctgcgaattcgactccctaaagctcctggaccgaatctggagctccagcgacatcttcgctaccgaaaataaggagcttcccgaaaagctgccatggactctccgcagatacatccgcaccgacagattttattgcaagaccaagcttcaattctcgttcattgaagcgattgagctggaaaatctggagttggttcggtggctgctggataagttcgaagacattgctgttatcgatgggaaagtggttctggaaacgatgagcaccatttcaattgaagtcttgcaactcattgacagctacaagtacggcgttcgccatgtggaatgggaccaaaacacaatggcggaagcgatctcagagggccgcaacgacatcgtctggtggctacagcaacatttccccaatgaagactttaacaaggcagaggcgttgatgcaggcagtgctcaaggaggacatcgtcatggctgagtggctgatcgaccatggagcacagtggcgtcggccctttcctggcgataacatcggacacgaaatggcggctcgagggcgtcttgacatcttgaagtggttaacccaaggcggtagacttgaccatcggcgcgagggatgtacacctgcggccatggattgagcagcgtggagtggatttctgaacgtctttaaatggctgcatgataaccgatcgaaaggctgcactgagaaggcgatggagctagcagcagcacgaggccatctaagagtagtgagatggcttcaagctcatcgatcgaatgcctacgcgaattcagcctgcggcgtggggcaaccagatcaacgtgttcctctttctgcacgacattgcaaaatgcaccgcgaatactgcgttgatggcccgagatgctgaatctattgacgttttcaactggatcgttgctaactatccagatattcaagttgacacggatagcgagtgagtgccagagcaatgaaaaccttttattttcctctgctaccttacttccatgaagcacaaatcggatgcttgcattgtcatacttctcattcaccgaattgcagagaataagcccattattttcacacgagttctgtctagaaacgtcttagtgaatgaaatcgtgccagtccggaagctgccacttgttgaagcgatcaagatcttctttgtcaaacatcccattgatagcgatggccagcaacttccccacctccttgtggcctttagctgagaagtgcagtccgtccacgaagtacgtccgacgaacgtttacatcggggaacgtcgtgttgaagtaagtgtgcaagtccagcacatgcacattctcggcctccccgagctcaacacacgcgcgagcgtacttttcagccgcagcattggtgcgatccccgtgacgctccgagtcgatgatgcacggcggggtgatcagcaggatctggccgtgtggagccagcaccggtcgaacaatgtgcaggatcttctggagattggctcggtagtcttccagtggcacatggacaactttgtcagggccgtccacgatcgcatcgttggctccgaggaacaccgtgacgaacgaggctgagtactggaactggagctccttggagaagatcggcatgccatgttgcagcacccacctgcggcaataatgacactcttagtgtaggtttgattacagcaggctgtagtggtgaagagacacttgcttagtgttgtagcctgagagaccgcggttgatcgtgtcgacagaccgcacatagtgctgctgaaggagggtgacgaagccagacttgctcgggtcgctggcctgctccgtgatggagtccccgatgaagtagaagaccgggcggcgctcggaggaggcagcaagacccatggtgtgttgtgcgatctttgaggagcccagagagacgagaatagtgagcggacaggagggaggttgattttaactggacgtcccttcaacaatgtacggggtctcgggaaaagaataaattcggtttttcctggcgagtctaggaatgctgaaactttgcacatctactaatatgtccatcaaaggagtaatgccaaagtggcttctccttttcttgtcccgttcggcaacgaggacatggagcgtagccccctttactatttgtcagtcatcttatcgctagtaattcgcaatctttcatcccaaccggaaaggtcacacaaatacatatagctttttatattctgcataaataacggtaagaaacatcacagaggcgccaggcaacgccaactttgaggataaatcgctcgagatctacacacatttagcgcttcatacagcggcattacccaagctagatgcagggctttctatccatgccggtctcaacggcgatgttcctctcattgaagagttaaattcgccgaaatcacaggtttccgtacattcatgaagggacgcccagttaaatccctaggaaatcattatgaagccatgtccagtgaccagctgcagcctagaactgtggatagcgttcacggatccatgcacgcatgctccaaggattctgctgcaccttcagccgtcagctcttgagctcgttgcgtgtgcaagaagagcagcacctcaaattgactttcgtgcgcagcgtagctaatcgttttatcggaacaaccctcggtgcggtgagtgtgaagccatttcacgactcgatactgacctttgtatgctgcatcgcccattgcttctgccgtgcacccctcgcttcggttgtaatgcagccatttgacgacctccagagcaccacttcgagcagcgtcgtccatggccacaacggtgcagccctcagaccgatgcataacccatagcgtccgttgtacagccaacacttgtgttagcgtgcagccacttcaccacatgaaggtgtccgttttcagcagcatacccatcgccttggttctgcacccctccgttcgattctgatacagccattggactaccttcagatgaccattcctggcagcctcatcgatcgcatcggtagagcacccctccgtccggttatggtgaagccagcacgacgtttaagtgaccattacccgctggacggttcatcgcggctttcgggcattgtggtggtgttcgcttgatctcttcgtctctcttcctatccttgccatcgtcttccacgacacgttggcaaatttatcccacgaagaaatgaccctcgaaacttcaacaacttgggtgcgctgttcttgataaacgatcggttgcacgttcctgagagcctcttgctgtcgtgcacggagatatttggcaacctgaaggtgcccgttgacagcagcaatatggacgcacagaccgccctcagcatcatcaagcgtaaagtggctatcagcgctggtaagcttttttttatggtcttattctgacatgacatggcgtttggtctgaagattgtgggagggatgacccacttttctgctgaatctgactttatgttgaccggggtccagataaacacatgaggtaacgggcccattggcttcaccttgcctgccacctactcatacaaccttgtgaggtttgcttggtgtccaaaccttgtgcatgcagcaaacaagctagcagttagcgctgctcacactgtcatgctacgtcgctgcaatcgacgtcgcctatcctgttcgcatatgtacgatttgctgcaccgggactatcttggttgttgtattggggagggccagatccaaatccatgtcatgtcagaatatggacacagaaaaattctaccatcagcgcccatgcgagtgataatcgacggatactgttcaatgagccagcgcacaatgtcaaggtgcccctttcccgcggcacatgccacgaagcccaccatctccaaaagctgccccctctccgccagccatttcaacgcgtcaaaatgcctgtcaaccgcaacaaaatgtgcggctcggttcatcagcagccactcggccatggggatgtctcaatcgttgagtaatttgcagcacttattatattgtatacttattctgccgtgataattctggcttaactctaatccctaatccaccttaattatgccccgagttagctaattcccatgttaattccgggtcgcccattcgtggccgaattaggagcggcgatggttaggccgagttaaggcggaataagctaatccagcctgcgttagacggaaacagcgcgattggctgttccctacccgcggaatggcggatgacgacggtgtgggcacgctgaagctctgtgcgctcatcctgcagctggtcgtcggcgccgccctgtgcgacagcttgctcgacttgttgaagcgacgctcggatcgaccgcagcgagttgtagattagcgtgcgatccaggtgtggtcgatccaggcggacagttggagcgacggcgatctgcacgcacacaacgcatgggggcggacggtcagcgggatcgccggcatcggagacttcgacgtcggtggaatctcgtacgcggggatctgccgcagccgcgaggagagccaaaccggtcaacgacgacatagtatccggtgacccagcttcggatgatctgggcgaaggcgagcgaggacgggccgtttccggccccgccgatggccgggcggcggtgttgctgggggcgagggtggcgcagacgattctgggcgggttggtgaagcgcggccagggccaggaggagacggcggtgctcgatctagctgtgacccgcctgacgctggcgcgccggcagatgaagacataagatggaggaaacgagtgcagcgcgcgaatgcccgaggacgactgtgatgaagcggtgggagaaatctgccgaagtggccggacccatcaatctggatcaaatgagatctctcgttagaatgccatcgatctcagaagagtgaccccgtcaaatatgatagagatcgacattgatcggtattgacagggatgacgtcgatctcggtgaagagtgatgatctcggccccatggattacgcggacccagacacagagccagcgccaccaccaatgttcaagggagctagatagcacgcgctaggaccatatgagagcaggagaacggtaggacagaggccttaggcaaagctaacgtttaaaacagagttgattttacctgcttcttcacaagtggtcttcgccttggcaataccgggcacgggatatactttggccgacccgacgctacgcaagtcgacttacaccccaagatcaaggaacctcggacgccatgatagcttggccctgcgtccgtcaatcctcacttcgacccaccgctagaggaagcggcaagcaaggaaaggaaaggaaggtcatacaccgaccacaaggcaaccccaggccaagatcacaccgggccggcgagtgtcgatctagacaaccccagatcgaaaccgccacaactactccggcacagcgtgaatcatatccgcgttgctgccacaagttcccgctgtccgccagacagtccaagactcaatcccaagcgcgtcttctcgagatcacccgaagagcgatccagcccaccgacgggtacacaaggtgagggtcagcaacttcacggaagatcggagtacccccttcgttagtcagcagttcgggtgccgtgtacaagaggacccccacgatctgcaaatttcgcggagccgcttcgccacacacttttgccgatatctcggcttgtagatggagttacgagttgctgtttagatatgttgctggtggatgctatacgaagaaacggtatgtgttaacaactgcgatttccgagtccttagtagggctggcatacaaacgacaatatttgttccagcgacacaaatcagtaccataccctttttctgacaaaatgacacagttttatgcaataccatacaaacttctatattataagttagtacttagtgcaacactcaccgagagggagatccggctgctagtgcgcaaggcggcgactggcgaccgcttcgcagcggagctcaagacggggctcggcctcaaggcgtccgcgcgcacggttctacggctgttgtagcgtgtagaccatctggtgtacagcaagatggaccgcacgctacccctcactgcggcccacaatgcagcgcggatggaatgggctgaggatcacatacttaacccaggtaatgtctctaatttgttttatgttatgcttcgggatgctaacggttgtaatatgtgaagaaattcggaaatatactttttcagatgaaaaaaagtttaatctggacggcccggacggtttcaagtactactggcgcgacatgaggcagcctgcgcagtccttcgtgcggcaccaaaactgcggaggaagcgtgatggtctgggggggcattcagtgcccaaggtaagcgtgagctggcgatcctgtggggtcgccaaaactcgggccattacatttatacggtgtctgagtatatgctaccgttcgctcactctaaccacggtatcgacttcgtattccagcaagattacgcgtcgattcatacctcgcgtgagacgacgagtttcttgcaagaaatggaagtcaacaccaaggcttggcctgcccgttcccccgactgcaacccaatcgagaacgtctggtcggttacggcggcgcagatttacgctcatgaccgtcagtaccgtacagtgggtgatatcgaagaagcaatcatggcagcgtgggcttccatcgagcaggagtacctgtgcaagctcgtggagtccatgcctcgccgctgccttgctgtcatcaagcagaagggcggcctcactaagtactaacttataatgtagaagtttgaatgggattgcataaaactgtgtcattttgtcagaaaaagggtatggtactgatttgtgtcgctggaaccaaatctggtagtttgtatgctagccctactaaggactcggaaatcgcagttgtcaacacatactgcttcttaataaagcatccaccagcaacatatctaaacagcaactcgtaatgcctcctacaagccgagatatcggcaaaactgtgtcgcccaattaagggtcctaatgatttggcgcgcactgtaccagccgacatgtctggtgatacctccgctctggtggtaggggtgaaaggccgcggaaattagaagctgagctccctataagcacgcaaagttatgtttgacgttcccacttcctgttttaccaacaaccgcccagccaccacccagccaccacacaattgtaaccaagaaatctactgccccgtgtgggagatgcggcgaacctgcgggtccagttcattgctgcccaagttgctccagtcatatgcacccattctgcggacgccccaccgggaacgaagggtttggacaacgtgtagtctgtcctaagtgcggcccgcccaaccaacgtggcccagtgactgctccaaccacttctgacaactccgctgctacgagctcgcccagttcggccactgctctcgctgtggagcttttggacagcgagtcggacattgagctcgatgcatcacagcctcctccacctgcttctttgcgcacagttggacgtcacacgcaagcagggagcagtatctcaaaccgtcggaaggtcgttcggtggatggaaaagcacgaggagacacaagacgttgaaggcatgtttgcgaaagctgtcgctgcatttcctacgattttcaacttagcgatgcgggctgccaacctagccaaggcgagagattgctgggcgaaaaatgacctgattttggggtcttcttgccgtttcggcacggcgacgcggtgggaggcggcgtgtcagcaccaaggtgatcagtggacgaggccgccctcgcagcgaatgggttacgtggctactcgaaactccttgacgaattcgatcgtttaagcaaactgggagttaagtttgagccgcgactactgctgcagctcgcgaaacagattttgcgagacggggggggcgagtacactcatatgagcgtcgatgccaagcaggctctgatcaaagagaagattaattcgcgttggatccagtgcttcatggaggcccatcagattgttctgaccggtaaacgacagctcagccagcccaagatcttacatatcgagaagtaggttgcatctcatctcggggagttcagcgtgggtttgccgacgggtttctggacgaaaatggaatcgaaaatattgatgagactcattttgtcattgatttcgacaatggaattttttttttggcttctcgggcgaaaaacagattaagcatgcagacgtcgatccgaggcgtacccgatgacactccgggcgtgtgttatcgatccagtaagaaaggatggatgacacaaagactttttcgagagtatctgagcgaaaggaaagcaatccgagcaaatccacatggccgcaagaagaccatctccctcgacaactgctctggccacctcggagctgaccaatgtcaagatgaagtcaactcaatcaatgcagatctccagttcttccctccaaacaatcaccgacttgtgtcagccagtagattccttcatcattgcgaagataaactacacatggaaagcaaggtggaacgcgaaaaagctgagtctgatcaaggagaacagttggcaaaataaggttcgcaaggacgggtcgtggtcgggcaagcttcaaaaccttggtaaaaagtttttccttcagcttgcagctgacgcaaccagagatgtcaatcaccagaaagactgaacggcatgtcctacgctcgaaaagcgatgatccactgcggattgtcgcttggaatcgacggaacctggtctgtagcccaaccctatcctcatctccaagagataacatcgtgctcacttcgaagacgagcctgtgacttcaactccagatacacaaaagagcagtccagatccaggtaaatgagaggtgagactattttcgtgctacataaatagtcttagtcattaaatagtctgactcagactatttaatgtaaataagcccagacaccacttacaaaaaaatagtctcagtcagactaattaccgtaggtactgtactaaaaacaaaagtgcatctggtgttccagatttagtccgaacccaaaatttgtgatccaaatttgactcaagtttgctcacaaaagaaaaaaagtccgatctggcatggcgaccgtcggcggtgcagcttctgttcgtggtgacggccgtctcgctgttcctagactcgtccgtggagctgcccctccagaagtcgtgcagcttccagtctcttcgcctgttgtctcggatcgtcagatactcttcccacgcccccttttcgtcccgggagctattacggagcgacctgaccaacggatgtgcacggttcaagcggttgtgtcgaggaggtcgagtaggtgagctgcgtcattcggtctttcgctcacaagtagacgacgcagaatttttacccacccaccaatctcgggggtgactcggcttaccttgcggttcaagccgcaccgaggcgaccctcaataactgaaaatgaagctgctgtagccccacatgtattcttgcacaagagaggaaaatggtcaagaggttgcctgccaatttccagggattcaaggtcacatccgaggtggtgacacaagccgccttgggggccatcgatatcctccaattcttcttcgacaacggcaacagaatagcggggcaccgacttcgggaggccaacagacgctgcacggcgggccattccgtggagtggggaggagcttcaatggccagtgctatcgctaattgccatagtgacgttgtgtggtggctgcaccagcatcaccaatgcgaggttcgacttgagcgcggctctgaagccgtggcttcatattccgcacttgacagtccaccgacaatcctcaagtccgttccaataatattaaggcggaccatgttttcttttttgcgaaggaaactgcaagctggctcgaagcacactgaaatatcgccatgcagtccgctgaccagctcatcttgtgtgcgaacgttcattagaaaccgcaccggtacttttaaatctacgccaaacgtattaacgagactttgtatttttgaaacatgggcaacaagcaaggttacggtatcagttggcggcgatgctggtcaaccgaatcatccaaacgaagacgagctaaagtatcggccctttggatcagcgcggagcctagtgacgaaggcgagactgaacggcggactgctgcgtggtcgaatcgtccgactgggcggcaggagtgacgccggtcttggtcgcagaagcttgggtagtgggggcatccgttgtcggcggggccgtcgtcgccgggggcgcggtggtagcaggggcctcggtagacggggcttcagtcacagggggttccggaacagagggggtctcgggaggagacccagccgagccctggtcgttcgggcacggcgtctcactcgaatcgccaccctgcgtgacaggagtgtggtcgccaccagccgagccttggttcggtgtagtcacagttccagtccactggttagtgctgtcgccaccgttgttctgcgttgcatggcttcctccgacgccctggccccactgtccccacgagtgaccctcgccgccctggttcgagctgtcgccggagcatggcgcggccgccgagtcgcctccctggttaccggtccactggccctggccgccctgaccccagttgtggccctggttccactggccttggccagcttggttcgcgtcgtcgcttgggcacggcgtagcagcagcatcacctccctggtttccggtccaagtctgtccgccctggttgccctggccaccttgaccccagccttggttaccctggccaccctgtccccagctgtggccgctgccctggttccattggccttggccgccctggttagcgtcgtcgcccggacacggcgtagtagcagcgtcgcctccctgggttccagtccacgtttgtccaccctggttgccctggccgccctggccccagttgtgaccgctgccctggttccactggttttggccgccctgaccccagttgtggccctggttccactggccttggccgccctggttggcatcgtcgctcggacatggggtagttgcagcgtcaccgccctggttgccctggccccagttgtggccgctaccttgattgccttggccttggcctccctggttggagtctcctccgtgctggccgccctggttccatgactgtcctccttggtttccagagtctgtcgaggtctggccgccctgggtcgaggtctggccgccttgggtagattgctgttgctgctgctgcgttgcagtgtctgtcgtcgtggtcgtctgctgcgtcgcagtgtcagcggcgactccggtcgtcgaggtcgaaacgccgccgccagctcctagccgacgaacagcgtagccggtcgtggggacagaggcatccgcgaaggagccgacggcgagggacacgacagccaggtacgcagccaacttggtgaggttcattgtcgatggagtgtcgtcgagtgacagggagtgtaggtagcaattgctgggggtggagaacgatgcttgttggaagcaaagtaaattgaaaagtgaggaactgagggcggcgacaagatcctgaaccagcgcggccggcggtatgctgtgccgtgcacaggcgctcgtttgacgccccgttcgagcagcaagagtatccgcgcatccgttcggaggcacacggagatgaacacccaacagacagatcgggcgtggctcccatccggagatgactcgcagagcttcagaaacgaggcgaacctcagagtcgaacgtggcgtaatgccagcgatggctccacatggcgggggtcttgcttcctatcgtcgataggtgctgcaccgagagagcatgggagctcgcctttgccttgggagcatctcgtgagtcatgctcgcctatcgctgtgtagcgcctttgccgagatacgagtccgcgatgaactccagtatacagacgcttattgtgtccagcatctgagccggaagcgcgtccatcagctgtcgcgttcgcaaggcgccaccaacgcttgacacaattttcacgcgggtctgcagcccagccacgtagaagtcgctgctgtggcgtggctgttagttgatccgaagcgtgcgtacggcaaaacatgaaccgcatcttgatgtagaggacttcggtgcgtcctgtccggtgcatcacaacttcaaggtatcgtcgcttgttcacatgtcagcatgttcaacatcgacttcagactggatggtaaccatcggtgtgtgccagggggcattgtgcctcccgacgtcggcttctgtagactctgtctgtatgaattcgcacagctgaatggggccccacgaaaaatagatagaccctgtgaccgagctaagcttcctcgctgcgcgatagtcgctgctctttcggccggccatgaggaaaagatactttcgcttcgagatcgtcgcgttgtcatcttcaagaagatagttgccgcaccgtcaattcccggttgctttatcacccatacgaacagaactggacgtcgtcgcgcgctcacgagctttcgcgatgcggcactcgtcgccttcaccataccacgtaatttgttaaaactttattttacttaaagaaggaggtgggatcaccggcctagaaggggacatttggttcagcgcgttgctgcttgacatcgcactggcaagttcatttggcaggattgcatacgagccgaacaatgtatagtacgacttcccgagagcctggtgtccttaattaaagcctccattcggctgcaggtcaggatagtgttcggtgggccagtcgcgaagttatccaagggcttgtcaaaggccgaacctggcattccggtggaaaaagtgggcttttcatcgtcctgtagaacgccactctcgagcactttacgaagcagcgagtgtttacttggctatgaaggtacttgaccacagctagatgctactccatccatggcttggaccctacaaccctcgcttcgatctagatgcaaccactcaatagttttcaggtgcccgctgcgcgtagcacagctcatggctgcggttgcgcacccttctgtttgatgacaatgtagctgtttgacggcctccaaatgacctctgctcacggcacaactcatagctgcagccgaacacccttccgaacgatgagtgtcgggccattccgccatctccaagtgcccacttcctgccgcgagttccgtggcaagcttcgtgcagccttcggtccgattggactgcagccacttcaccacatccagataattcagagttgcagcttgttccatcgcttcgatcgtgcataccaggctcgtcccacgcgaagtccgttctgggacgagctgcttggcccggcccgcgcattattattcttcatctgggacgtgctgttgcggagaggaccaactgacatgtttgtatcgtcgctcggctcgagcttttcatcgacaaagttcatttcaaaagctgcaacgaccatgacgacaggaaccgagacgatttcaggcttgacagcattcgcaccgctaccggcaccgtatcggttcgagatctccttccgcgaagcccggctgaagatcgtcctgcaagacgtccagacggatcaacaatggtaatatcaggtgggggctctaggtgaaagcagtgaactaatcataacggtattgtgttttgcaggtccacgggtttcctaaacgaaggcgcctacatgacgagtacgaatcgaattgcggatgtgactaccgctgactgtctcggtgcgttgttactctctatcaaacattaagtggctgtatgtactaattcttgctgcttcaaccgctgaatagattttaaagatacgctggagttcctgatggacgctacggggagtgaggccacagactcgagtgatactacgtgtacgagcgatgtcgactcagcagcagcaacgctggattcccaccgcatccgacgggagctggtcaagctggagaacaacgccctccagctcaagctcacagtcaagttccgcgtgctcagctcggcgtggggggccacgtatgtcttccgcttggagccgcattcgcaaaattgagtcgagcagctcgagctgagacttcttgacgttgagcgaagactcgaagaagccggggctcggcccgagcggacgcaaaaccaagtgactcacctgagcgcgatatagcagtttgccggccggctgagcggacgaggacggatgtcatcgaacaacattcacactacatccgacagcacttgatcgattctggtatgaatgactcttacggatgcctattcgcctcggagcttcttttccttctagattgacgtcagatgcacacgatgccaccagagaaagtgacatgatgctgacattggggacaactggtgccattactacatcactgcatcgtattatactacatgcaacttcaaagcgctcaacatagtactgactcattccatttcgcgttaaaattatcgattcgatatgttatgaggcataacttataccctcctctttcagacaccaattttcttctgcgtctatagattttcagagagattaattgaaaaatcatgtggtcaccgtgatagtactttaatgctcctacgttgtcgctgtacatccccggattcttgtgcgagaggaagcccgggcggacattgtaaaagcaaaggacaaacacccggtgtatcctactcctaaacgcgatagagatctcctagacctcagttttgactcatcaaacttgaaataggttgctggcttcatcggtttaccctgcaagttcggttgagcagttagcctggcagcgctaaatattcgaattcacggttgtttcttgttttatcgccacctgcaattttccgagcacaacactacaatctaaaaaataaaagattatgcccgggcattagcgcacatttcagtggcagaaaggaagaaaattacgttggttagcctgttgatgataatcgttctactaactacaaaagaactaaagttaaaactaaatccggtcctcatccgacgagcaggaggacgtggagtcaccacagtgggtttgtcaaacccaagcgttgaagtaccaattcgttggagtgacgatatgaactggcaacgcctttgaaaagaagtgatcaaacttgatacacttggttgtacagtggcagatgcagatgctgcggacgcgaaggaaatgcccgagtacatcgtttgcctgtaagggtatccgtacaagctaacttcgaactgcgaacccccccgggtccaccacccgggtccccaataaatacaggtgcgtccaagtgctcagaggacgagtgctgcttgcgacgctgcaatgctatctaggggctgttcgctaatttacagttttatcggtgataaaaaaatcgctgtgatattgcaattctacacaacgaccaagtggattgtcggtatcgatttcgtgatgcgcagcttttatcggtctattggtaggaggctcccaatgatagcaagaaacgtattttaatgatcaaggtctccgaacttggttggaaaggttggactccggaattagatcgacgaagcgcgagtggacggagcccgtaggagcgaaggcgaccgaagcgtcgttttatgctgaagattgtataccagactgaagaagcagacgtatgaacatggaggcaagcagttcgagagagagaaacacgacgtcgtcacacgaagacgtaactatggagggcgcggacacaccagcagggggcttgagtagctccagggccaaacggccacgcgcccaaacagaccaagggatgacagaagatgacttgaggaagaagagctaattcaagctttcacggaggaagagtgggctgacgtcgagcgccactaccacagaagtggttttcgcaatgaatgagcgcttggtgagggtcaacggctgtcgtatgacgctagccgacttcaagcaggacatcatcgagctgtgtaagcagttgggcgtgcttttcgagggagacgacttgattgaaggcgtgatgttttatcagggcgcccaaagaatctggaccgagcactatggttggtgctgaagaaggacgaggtaactgtggagggtgtgcgcatttgggtacagccaatgttcacgggcaaaaagaccacgccacttacgcttaacgaattggagtacatgaattgcaaccgtgtctccgtttcccagttgtgtgacattgttaaggaatggggtggagcagacttcgtggtggtttcacacagatcggtacaacattcggcagcgaggcagacgccctgtgcagaaatgtttacaagtggcagcaactgagtcgccatatccaatctactccttccggttgttcttcccaagcccccaggcagcgaacagagtgtacaagtcgtacctcgagtcacagagagggcggctacggggccatggagacccgacgagtaccatgaagttgaagcctgtgccacatgcagaatgggattcatcaagcaatgacccgcggaacgagaaagcggtcaagaattatttcgcgtcggcatcttcggattacgagttgagatcaaagcagcagacattgaggaagtgttcgagagtaatgggttgggtaaggtgagagttgaaattcgtggaaagcaaccgctgtttggtgtgggaacgtgtatgtcatccgaccagcagaatgccattctcacccaattcggccccgaaggcaccaacgtgctgaagtacaagaatataccgctttaccaaagaaaatgggaggacgtgccagcccagcgccgctgccacgaatgtaagcagcccagtcatctcaggtatgtatgcccgcgccttactggtctggagtcccaacatcagccagctagtgctgtagtgttgtcaagccgtcgtgagaactcggccatgtggaccagccaaggtctcaatgagtacacagaagccatgctagaccgcctcgtgcgcgctagaacggaccgtttcgagcagcgcttactccatcttgaccaacagcagcaacgcaccgagcagcacgttcaggaaatacgacgagatctaagtgggcaaattagctcggcaatcactgctgcagccacgacgttccaggagcaactagaggaacaaacgaagactatcgccgatcttctgaagaattttggtcttgggggtccagcgcgccagtagggtgggcctccaaacaaaccactgggaccatgtggaggtttcgctggacagggttagttgtgctcctcctgcttctgcagctggtcatgaatctcccggcacttgtcaatgctgaaagtcgtaacgctgttgtcgaggccgcttcaagcagaggtctggaatggccgagagaaggtgaagcgtatcgtgatgaagcggatacttctagtgggacggatgcatcggtgtgggaggacagaagtgccgctggggaccgtactacttcgcgccactgccgcggtgggcggaaacacagaccatggagacccgttcgatgttcgtatcacagtccaaacgacccggaacgaagtacagtgttgaggagcattttgcagcgggaacactactcgggcgattacattggggatgacgagagtgggcacgaaatcgatgaaagtgcgatacgtgtctgtactaccaatatcaacaaaaatttgcgtaagaagatgaatgatgagttggctagctggatgattgccaacaaccaagacatcatgattgtcagtgatccagcaccccaggacagacgcgttgaacaggcgtgggtgagcacgacggagcctcgcaaagtgccagggatactggtaataggcacgaagtacattggaatggcgttgctacgggaacgctgggaaaatcggctggtaaaagacagcatttcgtactctccaagctacaggtcgatgagggtcaccatacgccttggacgagcccgcatgctgtgggtgattggtacatacattcatcattcacctgatcagcacgaggaagaacccagatctgaatgggagtggatccaacggcaaacagcactcgggcgtgaagccaacgcaattatcatcctaggcggcgacttcaacacctacccagaccccgatcgcgaccgccaaggtaatggtgagcgcactcggtcggcacaacgcatgagtcagtgctttgccgactgggtgggtgaccatggacttgtctcgtcctttaaatgcagacatccaaacacgaaccggtttacgtacgctcgtcaaggcatcaaatctgcacttgacgacatttacatatctggagagaatgaatcggtggtggtgagaagtgggatttggctcaacagcatccttagcagtgaccacgtgggaactccgtttgctgttctgcgctgcgaaagaggggcacagatgccaattggtctacgtggagtaactccaatcaaggtggtcaatacgaggaccaaaagcatggaggaaatggagcagttcacacgtaccaccgaccaacttctgactgagaaaaaactcaccctgattgatgatattgctgtggagaatagctcagaggagatcttgcaatggcttcagcatgccattgaaaatatgaacgagtgcttaagcaccagcgcggttaagttgtggggtgtcacgaatcagtcgaagcgccaactcgctagatctgtctgtatcaaagccagcaaccgttgtaccgcccaactcaggcaggtgaaggtgctacttcaccttccggacactggagtggaggaaattcaagctgcgatggccgcgattatgtggccacgcttgtacttgttgacttgatccggctcgtcaggacattccacgagcacatggatgtcttcttcaactcgctcgaagtagtggccaaagtatgcagcgttgttgaggtcccttgtctcgtccagcagcaggtgttcttgcatgatatttttgactcgatctggaaatcttttcgcctccagcgctatcttcgtctcgcgagttcaaccacacgttgccctccctcgcgaggtacagcttcagcagatctgcatcaaagtagatcaagccgggcttcttctccttgatcttgtcctttagatctccgacagtctcgctgatgtcaatatccacaggaaaaacactcccgacgccaatgaccgcgcagaaaagcttcaccatcgtgtttctttttgtggaatgacagaatttcttctctgagcgcaattattctgcaattcaggcagaacttcttctcttagcgcaattattctgcaattcatttcacaattccctatgcattcattgttgacccatgactgctaaagtcgacaccagcacgaatgttatgctgcactgccataacttaaccacggccaagagagtgctggtggtttagtgaggtgcgacccgctaaaccgtcgctcttgcgagctaagcccctgcatgatgaggcgccctggcttatcgctgatcgaaagacgggcgtgtcgaggacggtaagtggccgctgctgtccacgtccttccatccggagacacgacctcggtcatcacctactgcttgtactgcaccacccaccacgtacgtcggcagaaatcagcccatttgtcacctccaacataccgccccgaaaacttgcaagggttggtggtggtggcgcactactctcggggacaacaataataagaaggaaaaacaacctcagtatgtattgtcgccttcccgaattttgcgccctctattcgtcccataaatcgtcttggctaaataaagaagtcgttgcgcaaaaactatgcatctcgctttttgccgaccacaagccagcatcttcaccacagacacctgcccacggacgccaatgacggccgaactacccacgctacccgagctctgcgacgctgtcgtgacgatcaagatcggcgagccgctgacagactgcaggattgtatataaagcctccatcgagatctccttatcggtgcgtgagggctatagtgtcctaaaggagaggctaaagcgtttgtttgttgacgacaccgctgcaatatggcctgccgacgctgctatctacgtcaagtcgacggtaaatgcgcgccaacacgagtacaagcgtttaccggaggacgagcaaaggtttatcggctttttgaaggcggtgtggacgagattttggcgccaaggcaaacgcattcctctcttcctgtatgtcaatagggtaaaaaagactaatcctatccacagagctactgcaagtcgcgttgcgcaagctacaaagagtatcagcgagctactgcagtcggaaaatagagaaccgccaggaccagcttcggtcgaatattgggcgagtgtacaagcgcgtcagcctgacggagccccagttgtacagtccgacaatgagacgtttcgacaactaaactacgttgataggcaagctgaacaacaccgcgaagagcttttggcagctacagcggaaagcaacgaacctacgcgacgcatccatatccatctaaatggagttgccgtacccatcgacatcaatattcaagagctgcgtgatgttctcgggctacccggatacgacttgcgccccccatttcgtgcccgaattattcccccaacggcagagcaacacgaccttgctgacgtcgaccatgaggaagaaaaggacggcgaagacgtagagaaccacgaggaagatgaagaagaaaacagcgagcaacaccaaggtggaagacagcgaaagcgaagccgacgagaagtcgatgccgaagagaaacaagacgatgataatcgagagcacgacgaagctgtagtttagattaaatctttcgctctatctacaaatacatactctactaagctagaagaatatccacactttcgataaaggttttttcctatggaatcattagtgcgagtgcattctcttaatgcaacttccataaccgcttctggattaactcggaatgccatattggcatggtgaattatccaacgctttagcaatgcaaaagaaacttcaattgggttcagttgtgggcaatatggaggaaggaaaaaaagcagagcgcacaagctcttctagttatcgatacaggtgtatctttgcattgtcgagaatcacaatgcttctcggaagcggccacggatttaatagcggcgcgactttttttctaaaagctttgtgaaacgctttgcgtgaaaacgttcctctagtcatttcccatgcaaaagaacagatatgtccatcgcagctaagacatatatccgctcgcctcttttaaaaggcaggtcaactacagcaggcgtacccctcggcgaccatgcgtatcgacgcatacaatcgcatccagcctcagctgtctcgtccaaaagacaagttgctctgggccagagtaaaaaggtagcagcttacagataacgacggaaaaatacgctccaccaaaaaatacgccatgcgacaaatctagatgactgatccgatacaaatagtcacatgtatttatagccaatgaggttctcctaaaacccataaattttgcagaaataatggttggagtagctctgcgagcctataaacacctcatcgatgtgggaatgtgcatctaagcatacgtttgtttataccttaggcactaagttaccatcagattaacgctcggtcaatgttgctgttattgtatgccagaattggttctttttaagcatagactggcctgagcactgagaaagcgcacaagaacccctcaagtatattgattgtcattgtagaatgaaacaataggttttgtttaagaaaactgcttctccgcagcttttaaagctgttgagctccataaccacaaacaatatggacttacttttgcgagatctctcgtccttctatacataatcggcccttttctagaacgcaaagaacactttcggccaatcagcgtgagtggcgtatttttagtagccttcggcttactatggaggatgatggtcagcgctggcgtatttttccgtggtcatctgtattgtaatagaccgcaatcttggcaggagcagcctcccttgcacgcttactcagaattttccgagtaagacagagatcaaagcggagcgcacggcaaattgttgcctcgtaagtgtttcgcagtgtaggaaatcgggctttaagtgcactgcgcagctcatcgatgtagaagcatgggtgcgactcagcatattggccaacataacgacacacctctggtggccatcgtgatgtacgctgcttcctcccaactccctcaacgtttcctctactttgaaaccaatcataccatctctgcacggagcgcactgacacgcccagaacactggccacgttagacatttctacgtcgtagacatgaacaagggtgacagcacgccaacgaaggtcgcttgatttcgtcatcgttcgccagcacagagatgatatagtgactggaaatactgtaacgaatggcgggagctgcagccgccattcgttaaaagagctcgacaaatcgtcagctatctctctactcgtttttcaattcgctaaacctgttcaaactgttattcgctctctgattattcgtgttgagcattggcataaaccgtcacgaaatcgctagtccacgccaaaatgcgtgaaatccacaatatttgctggcttagtacatgttctcctttaaaatgaaaaaaaagctaaggcaacaatagagcctcaacctcgcaacaaaatgtaggcagcacaaactataatgaatgcaggagttgatcgttgtcgagccaaagctctaggaaactgcagactgtttgctaagttccaagtcaaaattcagcagatgttgcggctgcgaagcaggcgcaggaaatgcgctgttgtgagcaactggactttacacactacattcatgtatgcttactaaatttcagagcttcttcgtgcaacgcgcgactttgttttcagaagagcgaggtccgatacaggaccctctttaatggtatcgaaatttgtcattggcacgtgagcaggctcgtggttcctgttgtgggtttcagcctcgaactcacaaaaccggagcacacactaggggagctggcgctcccggggaaccttgctgtatagcctgctcactatggagtagaatgacaaataactcctcttgctcaatgtctatccaatgtcttcctgtaacctgaaggtacctcgtcctcggacgcctctgccagctctgcctcacaatctgtgcggcctgatgcagcgggcacggcttcgatactacagttccgatcgatggggaaccctactaaaccgattcgggtacgaaagcagcttcgtgattccgatcgacggggaagccgtactcgtcgaatcgaacccgattctcaacgtttgcatcccgatcagcgcgtatatatagaagaaaagcaagaataatacgctgaagtttccgagttcatggagagtactaatcatcgttgtcaatagtttctgtagcgaaggccacgatcaagtaaatctcacaaggcgaagtggcgttagcagagattatggtaaacttctctttttttcatgatatacaacacttaccgtgcgagtttgaatagtacgaaaagtcggaaagctcgtagacctgagaacgacgccgtcttggacgtcgtactttgctgatggataaatgtaggcggggaaagtatcatctccgtggcgctaactacgatatccataggttgtaccgatctgcaacccaacctttccatttgaatatgaatttgttgcggtttagtcggcttcctactcccggagacgcgcactgctgcatctccgcctacggtggtcgcatcgctagatctctaggatacgagtccgcggtaggcgcccaagtcacgttccacgagcgtgactatcccctacatcctattatgcaagtaatgtgtactaatatgcatctgcaaactacatcccgttctcatcaccctcttcttcaaatgcccgtgcacgcttgctgtgccaccggtctctacgtcgtttcagtgtttccttacggtcggccagcttgctgctaaacgatttttgagtccgccgggcccattgtactcggcgtgacttgatgcctgcgttgacatcacgcaatagcgcttgacggtcatgttgtactttttcttcgttgctggcacatgtatgcttccaatagtcgcgtaatgtgacccaaatggtccggaagaggagcttgtgaagcgccactgccccttgtttagtgaaacttattgcttctgcccacgtccgactacggaccgtcacggttgggtagcgtctccatcccacaggcgcgtcgtacaccgtcaggccacagcgatcaagttggagtctcactttgacccaccaacgagggtgttccatggagctgctctccgcgtagatccacccaaacaccggataacaccactgcttggtagctccgcccatatcgcgccaatctggtatgagccacgcgttcgtgaagctttgggatagcgcgtgcagccattttggtattgactgacttgcgatggtctggacctgatcctctctcgctagaacacccaccagtatcacgcccttattagacgtgaaaacatcggcaaatacgggtagatgtcgcgattgaacaatgctgcttcctgttctcatcctcatctttgggaatccgcagaatccacacacccaaaagcctccagtctcatgtgacctggggagcccaaatacgtggcaaaccaatacacagggtcgcctgtggtaagatgcctatcaacgtggtgttggaagtcgtcccaccacgcttccgggtgaacatgaaaacgtcgtcgacccaccacgtgctatatcagaggctggggtcagtccttgcaacccttgaagattagcattgtcgatgttgtgctcaaacgttgctccagcccacccgggagtccattgcgtaagcgatgtgtgataacaccctacgtcgggatgacataaaccaagcacctccaccaaagtcaccgggagaattccttcactcaagcctatacttctctggcgctgttcatacagttcggactgtaccaatcgtgcaaacctctggtcgtgtaacagtactccggaatccccgagccactctagccactgggcattgacccatagattatcttgcaattggaccatgggccgccacaaagttgaaatgcggtcatcagacgcccacaacccgcgttggttgactcccaggtctacggcaatggaatggccgacacttggcggcaagacacactggtccggtagcatacattggctgcccacctgatagttcgcggcattgagcatttcatccagtacgattacctcacggcacacctcatctccgagtccgaatcggtgatcttgagtatcaaggtttccattatcgcacacaatacaggtatcggaccacctcacatcaaagcgattcttcactgcattggtatggagaagattcatgcgcgccctccagtaaaatcgccgtagctcatccgaccaactatcattataaatcatgggaagctcgtcgtcggacagtgtgtgtcgaataggaggtttctgtcgctgtttatcaatccaccgaccggcttgcgcagcatatgcttgatcatacaaaaagctcaatgtgttgcccaagacaggtctgccctcctcatctatcagtaggaaatcgtcgaatacgagccacgatgagtacgatctctgcatcacgtagctatggctctccttcgctgctgcatctacgcatgctagtgactgtcggtgaccacggagttgcgagtctactgtaaattcattttccatatgcgatcggacccaccgtgcactgaaagtacccgcgtcgcgcattgcatgactcagcgacttaatctccatacgatgaggatcccggaatttaatttgcggtagttgccctttggcatacgcccgtgctttcgcgatgataccgatagcgctcttattatcacacacttgttcaccagtatcgccatagagactgagccctgccactagcgcgtgaagttcacaccgcgttgatgtgatatcctgtctgtgaatgcaaagctgccccaacaccgagtggcccacagcggcttgcatcgcccaccccccacgggaccgttgggtattggcatcaatgacactaccatcccctgcttgcacagtgacagctgcgtcccccgacttccaggcaaattttacacattggtcgcgtaccccttcctcactccgccgacctccacaaactggtacgcagttagggtggtgccatttcccacactctccgcaccattgttcaccgcggtgcttaccgcactccgtacatgcagtctctagctgtagtggatggcctgttcgtagtgtagattcatagcggattctacttcttgccagcgcttcgttcaaaagccgcttgtcgttaagcccgctaactccgttgactgacgtatcactctacagaatgattcgttgacggcagttccgtcgcgttggcagataggtaggtatcacacgcacacacacggcttcaaattcagcaccgtctctcaggtgtgtacgttcaacccatatatcactcccccgacgtaactcgcgccaccaccgaactggaatgatcgtacccagttggtgttgcttaatctctccgatatatcgatgccctagttcgtagtgatcgatcgtaggttccgggcctgatgtgtccaatttaacagcgacaatccattcccctacaccaatgcgcaactggtatggcactagacctggtggtactttcttgcatcccaccggttcacgcaagtccaatgacccaccttttgcgagctgctctttccattcggaataaagctcgtcaacccgtgcccgcttggctccctgccacatccctttttgttggagttgagcccgtgtaagtagccgcgttccacagtctgtaacaatgtccccaacgtactgcagcttagagtccgtgttccaattaacagctaccagctttgatcgcagctcctgccgcgtgtagtggagtaatggtcgatcattagaacgtttggcgagtgcagcgggtggctgcttccatttacaatcaagctttagtggtggggtcattgctgccgcgaagcgtattatgcgccctgcccacgtcgtaacctgtactgggggcttgatcggtaccctaagcggattctccgtaagtccggcgttcacctggtacatctctagtgactcgacaagcaaatgatagaccggtagatcgggggagttcagtattcgaacagcttcgttgtagcggtggacattggcgtcgagttcgcaactcaacaatccgaggccgttgaatttatcataatagaccgatctaggagtggaatgtgggaggcgtaacactgaccgagcaacttgcctgataaatgtgtcaatactccccgctaccccaatggcccctccaagcaccatacgatatcgtaaacggggaatccagactgagttcacaatatatcgaaattgcacgagtgaaagtttctgccggacgattcgatcagcttcttctgtgagacggacccaggtaggtgtaatcgtagcctcccaaaggttatcaccacgttgatagacccctagatgcttaaaaccttcctccggagaaacaaccttcacctcccgtggaattcctaagccgtcatttagctgtacggcatcaaagtgctcattattcgaagtcaggtacatcatgaatgatttctccgcaccaaacacgcctccagtacccgctttgcccataaagatatttgtcgtcttggcactagcttgaattccacggagcgaggtggtgatatcaagttggtcatcgacaaagagcgtgctactgatctctatgcctcctccggtttggtggtgtcgaacttcaacagggtcaggacagtccgccaattgttcttgcaggcagtccatataaaacgctatgtgcagaatcgaaagtattgaaccttgccctattccgaatttacgcggtccggttgatatccaccaaacgcggtgcgcacatcaattatgccatcacctagcagatcaatcatgagatttcttggtttcgccgggactccgatgcctcggtaaatcaagtccatacaccaccgtggaatccgatcgaagcacttcaagcaatctttcgaaactagaattaatgggttctgcatcacgggtacccgttccagtaagagcgtaaccagtagcgctgcatcaattacggtacggtctcgctggaaaccgtgctgcatcttgctgatcggtatccctggttctacatagcgtttgaccaccaggaatagtcgacttgccaacgcagattgtaccgtgatcggacgccatggcggcaagcctttcgtattatcgagtgtaggatcgactgtagcagccttcgggaggaagatcatttgtttccggcgaaggatcggaggtgcttttcctgtgcgaagaataagttcaatcaccctacgttctcggtttctaatcgccgctggggcagctatccacatttcttgcgaaattccgccgtaccctggcgccacatgctgctggagctgccgatcaatttcagtttgcatctcgctggtgtacgaatagttctcccatttagtattatcattgccccaatgctgagcaaagcgacctcctcgctcaatatccggcaggatccagtcccgagcaaactggggtaggctacctgcatcttcaggagccaacgtgtccaggaagcgtgggcgctctgtcttttcttccggaggaatccagttatcaagtagtttcgtcaattcaatctgcacctcatccctgtcttcagtataacgtttaccagcctggcacgatacaagtgcacttcgaatcgttacgggaggcgctgcgcgtcctagtgagtaagaagcgtttaattccacccccactgaaccattgctgtcgctgctcctgcattctcaatcgacgttgggtctggcgccagtttcgccgtgtacgcatcacattccgccatcggccgtatacagcagaagcccagttcttccacgaacaaaggtctctcgtttgcggcaccctctgaacctctgcgagtaacctctgggttggctgaaagtgcgcgcagtcagcaacaagatggctgggattcaacgtaagtgcgttattctgccccaacaacttctgtatcatgattttgatgcagcatacttgatgtcagaacaggaggggttcgatggtacttctatggagaactggttctcatggcactcgccctggccttctctgcagttgtcgttctctgtggaaaaggaaaaacgtgcttaaacgctgctacattcactgtagttcatagcgtgttgggatcattgatagggaatcatggagttccggagacgatccatcaagtcaaagataccaactgcgtacagacgtggggggtatgcattcaggatgcacccatgttctacatctctgggttgtcaaattccagagcattgggcttttcgcagcgctggtgcaccagaaataagaacacctcgaaattatttgttgaagccaccttgctaaccaggagggccccacagtcaccaggtcggtgcacatggaaccatttcacgacgtgcaagtggccgtgtagccccgccttgaccggtgcctcctctgtacagccttccgcccgatattcatgcaaaatcttcacgatattcagcgcgccacgaccagcagccatattcattgcatccctcaggcctgtggtagtgtagccaattcacgacatcgaggtatccattttaggctgcgccatccatcgcagcgcttgtacacccggctcttgtattccaatgtaaccacttgacgatctcaaggtgtccattggtcgcggcattgtccatagccgtcgtagtgaataacttcggacagcgcacccatagccacctgatgatatccagatgccaccgttccgctgcagcatccgcagctgagctagaatagttgccagttcggttatgataaagccacttcacgacgttggtaaccggagttttaggtcaatcctacattttggtcacgggtcaaatccttactttggtcacgtgacctaagcgaatgaggtcacatgtaattcgcaaacggtttggttgttaagtaaatgcgttatagcgattctgctactgacagatagcgacttccgcaccattattccgcgctgccgtagtcaaaagagtcgtctggacgatagtctgctgtctcatgatccatctcggcatcgtcggcctctgaacccacagcactagagcaggatccagggtcatcagtggcgatggtaggctgctctcataagtctttgctcttctctgaccccacaatgtcggcggcttgacgcagttgaggcgcactcggcagctggagacgtttccgccgaggaggcctaccgagcctggaatagataacaacgcgcggtgccgcatattcgtgagaaataccttttcgtgaactacattacgcgatgggggccgtcgcatgttgaagtgtcaagctcgagtgctgagctgtggtgcgatgggttagctacttctaggcgcgtataaattttctaagtgaatgctacaaagcacgaaatagaatccggagacgatgtcgaaatttcataatgggttccctgtgtcgaccaagttgttcatgggagggtgtgtagccctacagtctacttgtactaccatgtcgcactatacgagccggttgcctcgctattacactgtgtactttgtaatagttgagttgcgttattgtgtagaatgaaagctaggtgcaattctgaatggtaggcggctcaaaatatagcatgatactactagcagtgaaatatggtaggcaaatacatgtacatggtaagtgcagtggaagttttcacagaagcgagcccagcccactcatcgggtggcttctacagagcgacgctaccaagcgggcagtaggaaagggaggaacagcgaaaccaatgcaaacgacagcgagaggggtcggtttcgtagaagacgctggcagaaggcgctagcaggagtcagctgaaacacatacacagattactttgaaatcaacctcttaagctgctcggagcgctactagacgccaaggcgttctaaagtttcacttgaatataacgcctaggccttttattcaaatataacgcccactaggcgttctaatctaaaaaattagaacgcctagtgggcgttatatttgaataaaaggcctaggcgttatattcaagtgaaactgcgaaactctgaaggatgcaaaaaggtaggcgttgtattcaagtaaatctaaaatccctgaaggttggtaatggcctgtaaggcgcccagctgctcaacccatttccgaactatcgacagcgagggtatcttgagttttgcggcaagggcggcaaacccaaagccgtcgacacccttgttgtactctccagcaacactgcgcttgaatccgatactgtagctatcacgctttttcttgggctgacgttcttggcgtgggcttttgtgtcgcgggagggcgattgtataatgatatgacaaaacaagagctcgacttccgctcgtatggctggtggtcggcacagaggtgctacctcgtccaaatggcagcagaattgttggaaactactaacgttaaccccaacaggccccggattaaggacaaataaaaggaccaaaagttagaggcttatgctggcattgattttgcgagatacaccgtattactgctatgaccagaaagcccttgattcgttctccaaggggggtgccttgcacactgtcctctgttgtccatcatgataaaaatgcagattgaaaagggtcatatataacatatcacatttcggtttttgtccttgattctaggacaaaaatcgcacattgacttgatttcattatgtggatccagacgttacacctctcgcacagtatatgtacttgttacaaatgacacctcgtacttacccgggcgtgattacactcaatacaaacgccaagtcttttttggttctttttttgtccttaaatcaaggacaaaaaatgttggggttaataagagttgtgttacgcttgggtcggcgttctgttttgctattgcttcaagtcgagggtgcgatcagattcgggattgttgaccaacctcgaatacaacgcctaggcgtctagtacgagggaagacggtagcttccctggtcctttataatagtgttccgaaacctacttacagctctggccgagtcgctatgatctcccccgcttaccgtcgccgtggacaacagtgcttgcgtccctccaagccgaagctggacgctggatggaccaccggaccttcactctcactggcacaccgtagcaagtgtcaccttgcaaggtaggcagagtgaattgtaagcgctggaggatcgggaatctgctaggccgttcgttaggctaaatgactgcaatgcgccgcaccttgaaacgaaacgagacggcgagtcgagtgtgcggccaaatctgtgcagcatgcccatggccttcggctacgctgtgatcccaggaacagcgggcggcagggtactcgacttcgacctcgagcgaggttacggtgccccacacgtcgagcaagactgaaggctaggtcgagataacgctacgtgacgctgagtccatgagctcaagcgctgaatgcgagcgtggtgactttgtacggtgctcgtactgcaacatggtaggtagcaccacctccactatctagggtattgcgatctgcgctcatactacgagcatcacacacgcgtggtagcagctcactgtttagcaatgtaactactgcccgtgcaacatgcatggtaggcggtctcttgcagtgtaaatggtaggaagcacacattttagcatggtaaggacttgcagcgcaacatggtagttttactagaagcaagcacgctgtgcaagatgataggcagcccatagtgcagcacttagccagcttatactgtaacacagcagcaagcagcacgtcgtgtcctgtaggaaaccgcgctgacagagtacgaaagcattgagggaggtgtcgtgtgtactgagaaaacttgtatgatgtctgaattcttcaggctgaagagaagtggaccctcgtccgcttcgaagctgcatatgcattttgctctctttctcatgcgggcgtgcgcgcatcttaccgtctacatcaatgggtgtgatctgttaagtttggtcacgtgaccaagcgtcctgatgtgtgacctatttgaccatcataaccgtgaccaactgttaggattgaccttttttcccctcttcgacgacgttcatgtggccgttgcgagccgcaccgatcatggcgtttgacgtgcatcttggtcgtaatttttctctttcaattgtccgtttccgtttcttgctcgtcgtaacagaccttcccagctcgtgcaagtattctagcacgtctaggtgcccttggttcgctgctgcatccatcgctacagcgtcaatcgagttgccccgcgctgccatctcgccgtaaacgaacaagtcgatctccaagttgtcgccgaactcgaacaagtcgatctcccagttgtcgccgtactcttcaatgaagagtcttcatacagccacttgacgacgtctaagtgtccattcttcgccgcctccgccatggtcttcccggacacaaacgctgctttagcgaacggagcgaacagcgcgggacaaacatcaagacgacacgggagagtatccccagctctttccttcatctcagccgctcgaaggtacttggcaacatccaagtgcagcggccccatgaatagagatacccacttccgctttaatcttgttgagcaatacgttactcccgcttctcgtaacgcgatcgatcacccagcgcacaacctctaggtgcccattttcagcagccacgacgatgagcccatcagcttcaccgacctggtcttgctcttctagccactgcaccaaatcaagccacccttttagcgcaacaaagtgagcgagctgaatgttcccctctctccgtatccacctagctccacgtgacagcagccactctgccaatgcaatgtcagcggcacgaactgcttcatccaaagtcttgtccaagtcgtgcagctcccgtgggaagtggcggtggatccaccagaccaggtcgcaagctgcagccctcgacatgatcgaactcctccactcaacggggtgccccaccccagccaattcgtggtgcaaattactgtctttctcgtacagaaatcgcagaaacccgtccttcttgcagcccgtgagcatggcctgaagcatcgctgggccgtctttcacttggcaaccaggaaacttgctcgacagccacttgaccatttccagattttcaagtctcagagccacggcaagagacaatgaaaattgatattgtcgatagtgagggtctgtacggatgaacctccgaagggtgaaattgtcgccccgactgtactcgttggtagagtgaacaaactcttcggtactgttccagatccgatccagaaggcggagagacccaaacgtgcacgctttgttcagctgcagctagctccacggaagcgtccgcgtatttagagagagacggtggtggggatgtggggcagccccataaactagggtttggagtcgaatagccagtagtggcgcctctcgacgtaattcttcatttcggcccattttcttcgacggaaaatgcatactgaacaggatctagtgtcgtgtacgtaaataatcaatgtacacagaatggaatatgtgacgtgtgagaatctgggcggttgaagttgctccaagatgcctccatctacaccgccgagtccagcaatgtcgtggtgaatcatgaacgtacccagtggtgacgttcattatggcggactcgtcgatctgtttgaagcgaagcacgcgactcaccgccgcgcagggtccgtagtcggcagttgtgccgtcttcttctttacattcgtagtccacgcctgagcgctcaactcggttcgcctcttgcgagcgtatctggtgcaattccttgctggaaatggagccctcagcgaatacaggtaatgtaaagcactggaagtatgaaactgcatccaatgtacaacaaaaaagaagtcggcattaaaaggaggaaaacgaacacaacacgctactaaaacatcagacaaccaaaatgaaagtcactagcagcatccgcgccctcgtcctcacatcattacgcttaactcccaatctttgcagcagtcgccgcaacttcgacatcgtgtggccggcgcgtgacctcgactgtcagctcgtcgttcgcctcaaatggagccacttgaaccagcgagatgctcgttttgcgcttcgcgtgcagcggcacgcggtcccactcgaggcatctgccgttcttgcagaccaagatgtggcctccgctctgctgtggtgtgaggtacactttcacgcataacatgtacactccggcctcatgaaatcggatgccgtacccttggttcgatagcgcgaacgctccttccttgagctccttccataagattcttagagtgccgatgtgcacactgtacgcatgcgataaccggaaattgagtccaaaaatgtagtagtaagtgactttatttggccttggccattaaaatcctggtggtggtcttactgttttttcttcttctactgaacttcgatctcaagttggggtggtggcggcgaacaagctaataagttgggctgtgtcggcagccgcattggtgagattcggctttgagagacttgaggtagagtgctcagtttagtaattttgataaatacatctgggcgtctggtggatgagatcgtgggctcgagcgacgaaagtgatggcagcagaatggagattgaagacgctggcgtagagatggagatggtcagaggcattggggacggtggcatcattgagaaggctgaggctgtggtcatcgcttcctccgagcacgagtggcaagacgaggactttgaagatggaacttgtctcttgtcagactgcaccaacacggctcaagcgaacggcttctgctacgctcacggcggatatcaggtgtgctatgctcttggttgtaaccggagggctgctgtacgagcttttcatcgcaaacgcgccgtatccagcgacacgaatgatctgcacactgctgaatacgacggtaatggaaagagcgcgaagaaccaaaaggtgtgggtccaactcgactactgcgataagcacttggatgaagaggaactggatggagatcacgcagccgaagcatcgagtcaagcgcagccgcatgagaccatccgcgctaccgatcgtcgttatcgtcgccacagcgtgtgcaagtggcttgggtgtatgaagtgggtgatgagagatggagacccgagcgagtactgcgtccttcaccgagcccaagacggcagctcagtgatctcgagaggaagtagcgtggcatcattcacccactccgaggacgagtcgagtgttgagcaagtggaggccacggaattcaatggcgaaaaggacgtccagcgcgactacaaaagccccgtcctctgcaaagaaccaggatgcagcaagcagggatctgtctacggagacaagaggggctactgcttttaacacggcggtggcgtcacctgcatcgtaccaggatgccccaagcagcgtcaattgaaggggctatgccgagagcaagctttgcgtttgttcctgccgccgacagaagcacccccaccaccactcttcccccttgatacttttctgtaggtagacccggaaagaacgtatcttcagcgaaacaaacattgcagtgtagtctcaggtgctcgaccatagccttcttcattgcagcagtgtaaaatggtagggcccgcgtcgttttccacctgcctcgacctccagacaggcgagggtgacttggtggcgcccacgccgttgcagaaatgatcgcgcgctgagcggccgagagtgcaaaaattactggcttgaaactggtgtatccctcaacaagtcaagccctgtcaatctgaagacacaattgtgattggctaatactatcctgtatcccatacgtgggtgtatccctctacaaaacaaattcggtaaccagctcctggggttaacgttggacaagcactgccgaatggccaggttgctctctaccttgagctcagcttcgcacggggacaagggacattggtcacagtggatgagtccaaaaatgtaatggctcgctaacaacgaactgtaatgtatagtgtacattatgctttgcgcgtgccatgcaaatcttgctgccgtcgtagctgtacagtacgtaatggtcttgcgagcgttgcaatggacgactgcacattcccactcaaaatacgcagagcggttacccgccaggtggtgggcattgacttggttcgagcggatgtctgcccttggccagcaatgacacagcaatgggccgctgcagtgtacatgtatgcagcagtgttttgtgtgagagcgacatcaatatacatgtacattctcccaatcgtagccaatatgatgcacacttgggaggtgatatcgacagcgggccgctacgctaactgcagcggggctacgtacaaattcctatattagccgtacaaaaaccaaaaacgggctgctggtacagaagtatgctcttgggatcgatttgcatattttgacaagcgttggtactttttagcatacatgtagttcgtatgggcttcctgtttggagccccagacaagaactgcttcgcgagcgtactgcactgtcgatagctccaccagctctgaaggcaagtcgaccacaacagtgcaatacttgtactcactgtcataagctgcatactaagacgtaagcacgattttagatccgcttaggttgtcatcgattccctttggaagatcatcgatccgcttcggtagtgtcatcgatccgcttgggtaaatcatcgatccgcttgggtatatcatcgatcagtttggttagatcatcaatctgcttgggtagatcatgcatccgcattatcaatagagtgtcatgcatttggttggcctctcatgagcctgcagtcgccactattttgtctttttttctacatgtatcgcaaggtattttacagctgacgataatgatcatgaatatgggtttcgcatgtacttctacctagctttcacgcctatactgaggtctaccgatatcattcttgcgtgcatatattagtgtaccgaaacgcatgcctaagtgtgaatgactgccggtggaacttactggtgagacttagtaaaacaagacacaaccgaccactgctcatagcgaagactcaagccagctccccgcatacttacaccccagatagctagctacaggtaggctacctacatgtatggaagccgttcattgtacgttagtattgtaccaacgtttgtcagtactgctgcgcctgtcctcgctccccgctgcagttagcgggaagcccgctgtcgatatcacctccctgcacacttgtggtcaattcctcgatgcagtatgttgtagctgaaaaggtcgattactgcaaggaagatcgcagaaaggtctgcatcatcatgcacttgttgctctttcgggctccttttgatccgtgctaagcaaagcggacatcagtgcgtggagtcggaagctactaaatagtctcgcattacatgcgcttacggtatggtgtccgcttaacgtggccgctagtggccccacgattggttgattaatttgaaattatgtcctctcattggtcaactaataggtccgcaccggacctgcaaagaaatgtctggtagtgaaagggttaatatgtaatttgtgtcggactaaagttttgtcaaaaagcgtagtgggggctgatcttagggagtgcctcacgtggatggagcgcaccgtgacctgccttgctcctcctcgcatggcggacgtaactgtagactacccgcattaccgacatcgcggcgtgcctgttccgcaattgccccgccccaacgcccagttctccgccctgcaatccgtgccgcccgccatccgccctgcgtgctgaagaaaactggcattagaaaagtaaggtgaaaagttacaatagacatcgccgtccggaatgaataagtggacgctgattggcgtgagtgtttttatgtttcgccagtgtgtctctgttgcaggtttgacaggtttccggattccggtccggaatctgccaattactgtaacagagtactacctagctttaccatcccatcatgtcttcttggtctcgcgctttccgtttggcacacgtaggaggccactatgctccaatccactgtgatatttgtcacagacgataagaaggtgatgcaatgtggccacgccgacattccagcaactgcgtcggttgagtgggaaatcttacgcgaacaacataccattgaattggaaactggagtgccacttaactcaagtataattctaacgccgaactcagtcacgcagattcttctgcgatccagtcgacgccattgatcccgacgtcagcgggatgcaagccttgtacacctgccacgagtagtcattcttcaagaaacgcactcccagccagtaccagcgaagcgtgcacgtgcccttgcacgatgagtagtccaccgtgtagtccttgcccgggaacttctcgtggcagttgtcgccatccagcaccatcgtgtcgtcgagccacacctcgcacgggccgtcgtgggtgtagccggtagagcgcatcttgttaccttccggaatgggctgaggggtgcccttggggtcggtgaagccacaggagaagtcggcgccgctggtgacgtcgtacttggccctgtccatgaaatcacgcagcgacttgtagccgttctccttgcgccaggcggtgaagtcctcctgggtcgtaaatccctcattctcgaggaaagccagcgggttgtacttggtttccttgtcgttagtcgtccacaggggctccggcagcagcacgatctggtgagtagtaatatccggaacattacgccgccagtttttttccttaccgtaatttaccaccaagaacattcctggaaccttctttcagaccagctgccatttcgacgacgcaacctcgacgtcttttcgatcttagggtggtttcagatcagctcgaccactgagatctaacaacagttggtttcgtctgaatttcagaattaatttatttttctcaaaaaaaagttaacaccctatgtatatagatacacatagctgataacatgtcgaacgaactaacttttggaaaatacaagggcacgccgatcgaagaagtattcacttccgatcctggttattgtcgctggatgcacaaccaaccaagtctcaatattactgaggatatcaagattttccttcactccaagtttcttagcaatgataattcgtatatgatgagttggggcaagtacaaggggaagacgctgaagcagattagtcgcatcgactctaattatatcgattggctccgtaagaatccattcgtaattgagaaatgctctaagcttgtcgaagctttacagattaagtaaaagaatattttttaatcagaagcacatctcaaatggttagctgatcaccattaggatactcagttttttttcttacgctgtagagtactctaaaatctccccggttaagcgatccagcgttagttcttgttcggacacaaccaaaacaagcatgtttgttccctggcaaccagcgttgacaccctgaacctgaatagcctgaggtacatcacgctccgtcaggcggctaacgtcagcgataaggacgcggttagttagagaccacgtctgatagtcaagaagaccattcaccagctcgggagttagatcaccgttaatcttagcaatcttagcgatctcgttggtaaagtggtggaagtcatagtcatggctgatgtcgaaggtctgttgcgaaccaatgcggacgttgaagttgcgaatgctcgaaccagggtgaagagtccaaggagccgaatcgaaaggactctgaaactcttggacagcagcagaagcaaaactaccggtctgttcggcaaaaggaaggaggataacatacttagcattcttgacagaagccgaaagccgaagatcaaatgcagcattaagctgagtcgactgcttatctataccagcgcgctggtagaaccattgggcatagcaatcgttgtatcgaaccttctttacgggcttagagatgatagcctaagggttctccaaatgaacgaaaggaacatacagtcgagaagtcgtgaaaggcatgtaggttccatcaattgtaggctcaagcgagttaaccacagcaccccaagcaactgcaatcgaaccagcgacactaagagcattgtacatttggtttggactggtcgcagaagcaaccattactggacatacattgccactcgataatgttgttcccgttagcgtcatatttctcgatgcatcaacatcaatagctgaagtgccctggttaacgcggaaacgaagacgaatttgtggattagccatcaagtcaagctccttgaaaatcggatgtaaatgagtaagcttaatcttaagcatatagtttcacgtccccataatagcaccaggtgaaccagcgccagctacgaacgcaccgcgaccaagttgattagcaatggtagtcgtggcagatgcagcaccagtagacggccacgacgtagatgagtcagctccagcattggagggtagagagaagacgctagannnnnnnnnnnnnnnnnnnnnnnnnnnnnnnnnnnnnnnnnnnnnnnnnnnnnnnnnnnnnnnnnnnnnnnnnnnnnnnnnnnnnnnnnnnnnnnnnnnnnnnnnnnnnnnnnnnnnnnnnnnnnnnnnnnnnnnnnnnnnnnnnnnnnnnnnnnnnnnnnnnntctccggtagtagcggttgcactactgtacttggttgattgagcagcatccgggtatagaaacgattcagcaccatgcttctcaacatactgagggctgtacccggtctgagcacggatattgttccaaaacagcttgtagtctgccatcgagacaatggttttaccattgagttcaagcgacatcgaatcgatgacgttaaagttgccacacttgagaccaacacaaaataggttggctgcattctgtacatttgtaccgtgcgtgttcttcatcgaaaccttgtatggtagcataatgtaagcatcgcggaggcaggcaaatccttcactaccattaagctgggacgtagcgtcgatagtgataataccgttttggtacgaaccttggttaaaatcgataacaaaaggcacgcgcttgccagaggagaccttaatctccggatcaactcttgagcgagctctggtaaaggtattggtcggaaagttgtgtttcagacatcgttgaatctatatctcgatcaatatagttttgttaaattaattattatgaacagccttgttaagccaattaccagtgatcccgatcttattgaactcgctgagaagatgggggttcagctcgataatatattcgagccaagtgagatcactcagccgcttccgaagaatggatcatatctgattttgctacgacaacctaatatggatgtaggacactggacagctgttcacaatggcgaatattttgatagcatgggagaagcggcacctacgaagtatggagtcgggcgatatagtaccaaccaatatcaaggtacgtatggcgactattgcgggcccttctgtatgctttggttatattccaagcagcacaacagacctgatgtatttaagaacatgaaagatctgaatttgtcaattctgtattaaatatgttttagggaatatagcaataatgtatcgcgaattgacgatttccagcgatgttccagccgccaagctgaccaaagctctcaagacaggtaagctaagtcttactgcaaaccaactcaagggttcaggctctgttatccatctccacccagcttcgtatgagaaagcactaaaggctcgcaaggcaggtcgtggtgttagacttgacatcacacgtcacgagatcaagaaaagatacaagaagctccaagggggatccatttggagtaaaatcaaatctgggttatcgacagcattcaaatttgtaaaagacagcggattgctttcaaagggattagacgcggcggttccggctcttgcgtcagcgtttggggcccctcaagcagcaatcccagcgagagcagctattaagtcattgaccgcagttggtttatacgactctgacagtgatatagagaaagagggaggacgtgtatctatagcggatgttaagaaggcggcaaaaaatgttctcgggtatgctaaacgtaagggggttctaactgatgcagtcgatgcaggtgagaagtttctactatcaaaagcaagcaaaccggaacatgaaactctaatcaagtcagtgcgaggtgaggtaaagagacgttatggtgtgggagtttctaagaaaccagctaaaggcagtcctgaaatgaaggctaaaatggccgctttgcgtgctaaacggcgagggggaagttttcggttatgagagttggataaaaaaaattagtcattcgattatttatttttttggacgaagcagaagcatgatgctcactgaagtgtcgcggaacttaacctttgtgtcattctgattaaagattgagatcgtgattgatgtgcgcgctccattatgacagttcatccaggcatattgacttggcttatagctgattaattgacctacctgagcatcaccacgatcaaacgcactaagaatatcaccagaggctacatactcgttcttaattagatcacaacgaacgttgtaagaagatgtaggatggatctgaggaattgtattactgagctgagcacttgaaaccgttgcaggcgctgaaggatacgtaccagtagtcaatcctactactttaccaaaagcgtcattatcgatgatgatgcgagggacacgcgttattgttggcaaaccagtaccgcctgacgaataaagaccacttgccggtcgtgtccaagtgccaccagccgtaggaagtgtcgttggagtagcgctaaaatcgaattgagcagcgtaatacacactgttttccgctagttgaatatagaaaacgttctcacccgatggattaattaaatacgctccagcatttacgagagctatctggatgcttcgagttatatcagattaactgtaaagcccatcaggcaagctaacagatacagtggatgcggttccagctgtcggaacttcaattttaaaggagttgttccagaattgagcggcgtcaatgttgtattcagagttatacatcgaaatcgattgaactgcacatgctacatccttaaaatcggcagcactaccagggaagctgtatttccatgtgctgttgtatccgtcttgaacgaggttagtggaatcgagtttaacaaacgaagcgcacatgatttatgtttattgattcactcaaaatattttcaaattattgctcaatatcgatcggcctatcgaagttatatctgatttgacctttgactgaatccacgaacagcatctgtcctttgcgctccgtggctttattgtagtaatagacgattgatcgttcatcaacgcctttgatgttaaaatcctttacaaccatctgtaaatcacgcttcgaattcgcttttagaatcgctacgtactctgaattcaaccgaatcattttatcagtggcaaagtagctgtggcttaggaatatggttgagagtttaaagtgtcgcccacgtgtatagtaatgagagaagatattcttctgaagtagtttatcattgctatagtcatcgatgataacaagctccggtttgttagagcttaatggagtatgacgcacctgatctactttaggagggctatctgcgtcagcaaatgtgatgaatccttccaacttttcccggagatactcataaaagctcctgatggggattacgagcaatgatagttagatgagcaaatacgtgaggagaatgcttgagaataaacatacaaagattgttcttccctgaaaagcttggaccgagcacaaccattctaaacaaagctttcatatccaatgcggggatatcacccatcgaagcagacttgaattttttcggaatcgaagccccgaagtcaggaatagcactcatgactaaaatcgtttgatctatataagattaaacaaaatgagttccggtttttcatatccacagcctacatttcaatcatccatttataatccttcattctatctttcgttagactcgagtggttatctaacatacgattatgcgcagacactatatttgagcaaggatgattacaggatgggctaccttagcggagtaatagcgggaactgcttcgtacagcaaaactttgattctcgattcgtccggcaatatcagcggaattaatagctttggagcttctactattactggaacgctacaaaccggatcccaacccaatataacgtctctcggctctttatcaggtcttacgatcggtggaaatttatcgttcagtggatcatcgcgctcgatatcgataacaggcacttcaagctacatcgattgtcgagaatatcgccagaacgggactatatacgatttgggccttcttgaatacataaacggagttagttttggtaccgcaacgtcaaataaattcctattatgcgactcaagctcgaatatcggaggcctaagttcggtaacggctactactctgacctgcacgaacttgcgccagggctcgacgtattatgacctatcaagctttttaacatctattccgacttccctctcgctcaataatctgtcaacgagtggggatatcagctgctccggcgttatcaatgggtttttagcgtatggaaaccaatcagctataacaacagtaggatcgctgacagagcttgggatcaactctacagcaacgaatgaatatttctcgatcactggtagtggattggactttcttgatggttcttacacacgaatgatgactctaaccgggtcgaatacgactcctgttcaattccagatccaagtccataatggcaatcgatcaaccacagcgaacgcgtcatggatcgggaacatcacaaacaacgacctcagatttagggtcaataactcgacgtcgatgattctaactaccccaggtcgtcttggtcttggtactacaagtccttcagctccgctgcacgtccctggcagcaacagctttgtatttggagcaggcggaacgacagtgtatcgcctcagaactgatagtggagctacagaatccgctcttagcccgatcacatattcagtagcgggtatattcggaggatacattgcctgtacagccatggcgatgacgagcgaccgcagattgaagaggaacattcaatcgtgtccgctcgaacgcatcaaacgactctacgataattgtgatgtagttttgtatgagtggatcgaatcggataatagacctggtcaagatgtgggcctcatagctcaagaccttgtctcagcccacctagccgatttaatcagtgttttctatcgcgatgatattcaggaaggcgaagacccatcgtttgaacctgccaaaacacaacttaacgttggttacagtcgaattgcagcatacaatatgaaaatgattcaacatctcttggatcgagttgaggaattggaagcaaaggtatcatctctaatatagaccatgccattcacatttcgtatttcgaagagaaaagacannnnnnnnnnnnnnnnnnnnnnnnnnnnnnnnnnnnnnnnnnnnnnnnnnnnnnnnnnnnnnnnnnnnnnnnnnnnnnnnnnnnnnnnnnnnnnnnnnnnnnnnnnnnnnnnnnnnnnnnnnnnnnnnnnnnnnnnnnnnnnnnnnnnnnnnnnnnnnnnnnnnnnnnnnnnnnnnnnnnnnnnnnnnnnnnnnnnnnnnnnnnnnnnnnnnnnnnnnnnnnnnnnnnnnnnnnnnnnnnnnnnnnnnnnnnnnnnnnnnnnnnnnnnnnnnnnnnnnnnnnnnnnnnnnnnnnnnnnnnnnnnnnnnnnnnnnnnnnnnnnnnnnnnnnnnnnnnnnnnnnnnnnnnnnnnnnnnnnnnnnnnnnnnnnnnnnnnnnnnnnnnnnnnnnnnnnnnnnnnnnnnnnnnnnnnnnnnnnnnnnnnnnnnnnnnnnnnnnnnnnnnnnnnnnnnnnnnnnnnnnnnnnnnnnnnnnnnnnnnnnnnnnnnnnnnnnnnnnnnnnnnnnnnnnnnnnnnnnnnnnnnnnnnnnnnnnnnnnnnnnnnnnnnnnnnnnnnnnnnnnnnnnnnnnnnnnnnnnnnnnnnnnnnnnnnnnnnnnnnnnnnnnnnnnnnnnnnnnnnnnnnnnnnnnnnnnnnnnnnnnnnnnnnnnnnnnnnnnnnnnnnnnnnnnnnnnnnnnnnnnnnnnnnnnnnnnnnnnnnnnnnnnnnnnnnnnnnnnnnnnnnnnnnnnnnnnnnnnnnnnnnnnnnnnnnnnnnnnnnnnnnnnnnnnnnnnnnnnnnnnnnnnnnnnnnnnnnnnnnnnnnnnnnnnnnnnnnnnnnnnnnnnnnnnnnnnnnnnnnnnnnnnnnnnnnnnnnnnnnnnnnnnnnnnnnnnnnnnnnnnnnnnnnnnnnnnnnnnnnnnnnnnnnnnnnnnnnnnnnnnnnnnnnnnnnnnnnnnnnnnnnnnnnnnnnnnnnnnnnnnnnnnnnnnnnnnnnnnnnnnnnnnnnnnnnnnnnnnnnnnnnnnnnnnnnnnnnnnnnnnnnnnnnnnnnnnnnnnnnnnnnnnnnnnnnnnnnnnnnnnnnnnnnnnnnnnnnnnnnnnnnnnnnnnnnnnnnnnnnnnnnnnnnnnnnnnnnnnnnnnnnnnnnnnnnnnnnnnnnnnnnnnnnnnnnnnnnnnnnnnnnnnnnnnnnnnnnnnnnnnnnnnnnnnnnnnnnnnnnnnnnnnnnnnnnnnnnnnnnnnnnnnnnnnnnnnnnnnnnnnnnnnnnnnnnnnnnnnnnnnnnnnnnnnnnnnnnnnnnnnnnnnnnnnnnnnnnnnnnnnnnnnnnnnnnnnnnnnnnnnnnnnnnnnnnnnnnnnnnnnnnnnnnnnnnnnnnnnnnnnnnnnnnnnnnnnnnnnnnnnnnnnnnnnnnnnnnnnnnnnnnnnnnnnnnnnnnnnnnnnnnnnnnnnnnnnnnnnnnnnnnnnnnnnnnnnnnnnnnnnnnnnnnnnnnnnnnnnnnnnnnnnnnnnnnnnnnnnnnnnnnnnnnnnnnnnnnnnnnnnnnnnnnnnnnnnnnnnnnnnnnnnnnnnnnnnnnnnnnnnnnnnnnnnnnnnnnnnnnnnnnnnnnnnnnnnnnnnnnnnnnnnnnnnnnnnnnnnnnnnnnnnnnnnnnnnnnnnnnnnnnnnnnnnnnnnnnnnnnnnnnnnnnnnnnnnnnnnnnnnnnnnnnnnnnnnnnnnnnnnnnnnnnnnnnnnnnnnnnnnnnnnnnnnnnnnnnnnnnnnnnnnnnnnnnnnnnnnnnnnnnnnnnnnnnnnnnnnnnnnnnnnnnnnnnnnnnnnnnnnnnnnnnnnnnnnnnnnnnnnnnnnnnnnnnnnnnnnnnnnnnnnnnnnnnnnnnnnnnnnnnnnnnnnnnnnnnnnnnnnnnnnnnnnnnnnnnnnnnnnnnnnnnnnnnnnnnnnnnnnnnnnnnnnnnnnnnnnnnnnnnnnnnnnnnnnnnnnnnnnnnnnnnnnnnnnnnnnnnnnnnnnnnnnnnnnnnnnnnnnnnnnnnnnnnnnnnnnnnnnnnnnnnnnnnnnnnnnnnnnnnnnnnnnnnnnnnnnnnnnnnnnnnnnnnnnnnnnnnnnnnnnnnnnnnnnnnnnnnnnnnnnnnnnnnnnnnnnnnnnnnnnnnnnnnnnnnnnnnnnnnnnnnnnnnnnnnnnnnnnnnnnnnnnnnnnnnnnnnnnnnnnnnnnnnnnnnnnnnnnnnnnnnnnnnnnnnnnnnnnnnnnnnnnnnnnnnnnnnnnnnnnnnnnnnnnnnnnnnnnnnnnnnnnnnnnnnnnnnnnnnnnnnnnnnnnnnnnnnnnnnnnnnnnnnnnnnnnnnnnnnnnnnnnnnnnnnnnnnnnnnnnnnnnnnnnnnnnnnnnnnnnnnnnnnnnnnnnnnnnnnnnnnnnnnnnnnnnnnnnnnnnnnnnnnnnnnnnnnnnnnnnnnnnnnnnnnnnnnnnnnnnnnnnnnnnnnnnnnnnnnnnnnnnnnnnnnnnnnnnnnnnnnnnnnnnnnnnnnnnnnnnnnnnnnnnnnnnnnnnnnnnnnnnnnnnnnnnnnnnnnnnnnnnnnnnnnnnnnnnnnnnnnnnnnnnnnnnnnnnnnnnnnnnnnnnnnnnnnnnnnnnnnnnnnnnnnnnnnnnnnnnnnnnnnnnnnnnnnnnnnnnnnnnnnnnnnnnnnnnnnnnnnnnnnnnnnnnnnnnnnnnnnnnnnnnnnnnnnnnnnnnnnnnnnnnnnnnnnnnnnnnnnnnnnnnnnnnnnnnnnnnnnnnnnnnnnnnnnnnnnnnnnnnnnnnnnnnnnnnnnnnnnnnnnnnnnnnnnnnnnnnnnnnnnnnnnnnnnnnnnnnnnnnnnnnnnnnnnnnnnnnnnnnnnnnnnnnnnnnnnnnnnnnnnnnnnnnnnnnnnnnnnnnnnnnnnnnnnnnnnnnnnnnnnnnnnnnnnnnnnnnnnnnnnctaaatcgataaaatcctggaatgttgatctccaatcgacttgtttagtaatcgctggcttgactctctcactatcaataccaaatacactaattgatgaaccatcaatccacacgtatccagttctatccatctgagatgttttacccatgctcttgaggataggaatgattttctttttcaaaccagccgacacaagcactgccttattcttgaaaatagaccaaagcaatcgattcttactatcaacttgatctaatgaggttgaagtcgatgtgtccaactcaaaactatcttcaagacgttgccttgaacggaatgcatcatcaccttcacttggatcggcgatttttcgttttcgcgttagtgaaacgtgataaagagggtcttcaagtctcatataactgctctcatcgattgatttactttcgccatcataccagatgtccctaatcttctcctctgtagccacccagtcaatcgattgataagtcttactctttctacccgttttgactgcaattaatgaccccttttcaccaagaaagtatctattgtcatccttaccagttttacgcttaattggcttaattcgaagcgctacccaattaggattggcgttaaacaaattctcaacccatgatcgcgcctccacttgatcttcggtatccaggtttttcatgtttgtttcagcatctaacattcttggagtattgtcgattccaacatcagctgtttgctgtgtgttatcgataccaacatcagatgtttgaggtctcgcttgaatatttctatcagtttggttaacacgatcagtattgtttgagctatttaccatctgcacgccgctatctactccaacatcgatcatcacaggtcgaatatttggagttgagacctcagggtttgtttgggagtatccaccaatcagtgttttttaatgactcagcagactcggatgagtcggtctgagttgattctgttgatttcttagggactgtagtaatcccattcgtgatatcacttgcccatgacgttcctgcatacatctgacgcttagttttggattgtcgaacgcggcgctgagttctttcaaggagctcctgacgtttttgctctctctgagcgagggatgtgaacgaaggaaacattttattgctatatcaaacgaaccataaaaaaatgagtagtgttaaatacccttaccacaaactcggcataactgagtcatgcctaaatggttgatagttatgacagatactattccgctcatttagaagatttagataacgatccttaatgcaatggaatggaactccaaaaattgcttccaactcatgtcgatactttcgattgactactgttttgcggaaattcgcgcatgcatcaagatttagcaactcattcttggttcgactcacctcccgaatgatccaaagcttacgccggagttgagtgagctcacgttctttctctacacaacttgggcacattactatcgtattgctatgtattaagtcagatatttcccaaaaatctcggaaaaatagattagataatatacttgagtcaaaaagcttacagaggatgtctctttcaattaaattttaaagctaatcacgtctcatttttttagcgcccaatactccgtctcaagagctgatctcgtgtcgactaaaaaaagaacatgtgtggccttcagttcgatagccacgactggtgtgattgcttcagaaaggaatttctttagccccaaaatattccttctctaactcagatggtctatttttattaattaaacggagatttgagaatggctcccaggagtcaggctcattaccaagccatttgatcagatatttgtacttcccagaccgtgtcgtcttgtgatccaagttcttctccgcctcaagaatgtcgcctcgattaatagtagcatctgtagtctctgttttaaccattttaagatcgtttggcgccttgtagagggtatgcccatttcttgaacggatttggactcggtagccatcaattccaacgattttatagactgctttgctccatcgagcagcttctttatcaaatgcctgctttttgagacggtataatacgcttgatccgacgtcaaactccttctcaattctttcggcttccacctgattatgactcagatctgcatccattactttgccttttgcatcatttggggtcataccaatcgaacgatgaaacgtggtattgtagtttccgataacgtcagtgataagcttttgcgaaattctcttggggaacattttagttagtctctgcttcagcgttctgttgaatcgttcgattttacccatggttccgtgatcaccgggctcgctcgttgttgtagtgctcaattttcttggttttgaagaactcttgagcctgcgagttcatgaactcactaccattatcgcttgtaatgatatccactttatggagtcgaacaaacgctttaagcgctgctaacacagttgctgctgtcttgttcgataaggccttcgcaaagcccaacctcgagttgatattgatagcagtcaaaattggtcgcttttcccaaaacgcaagatcaatttgccaagagttggggttatgcgaagctattttgaagccattgaatctcttattttgctcttgatatcgttgaatatcagtctgactcacataccaatcctttacaattttgaaagttatcttaggatttaactcctttgccttctgatacagagcttgagctccaataaaaccggtttttgggtcatagtagagtttctttaatagcgcgtccatgatctatatttacatttaaaaaaatccccagtggttagctgcttaaatatcaagtggttcagtcgtgataccatcaccaagtactcgacgtttgtcataatagtagttaagcgctgttttggtttgagtataggtgatgatagacttggtttctttcgatagtctgaaccccttgtttgtaccttgtagcgtgatgcgatcccgtacgacagtctcaaacccatcaggattaagaacaccattgtttcgaccacttccctgttgaatacccttcgctgaaacctttactttgtatgtctcattaggtaggtagcaaatatagttcttattcgatagtgagaccatagcatcacctgaccattcatctttgaacaaaccaggcgtacggcgatcaaacttagctacctcagtgttgtagtcgcgtgggaaccaatcgtatttatgctccttgaagtgggttcgtaggtcaggcttgatacagtcttgaaatggattatcacagctgaaagcgatataagccgaatcagtgtccatctcctgatactggaagtcagagcggttgaagtagaaatctatgcagtcgtagtagaactgtagcatacgtagcttagcaagctgatagatagcatcgataannnnnnnnnnnnnnnnnnnnnnnnnnnnnnnnnnnnnnnnnnnnnnnnnnnnnnnnnnnnnnnnnnnnnnnnnnnnnnnnnnnnnnnnnnnnnnnnnnnnccatgagagagataccacttcagcaaaggtgcgtatatgagaatcttttcaccaaagtagctacctatcagcttacgagctggttttgctcggctttgcttacgtgcctcgttgtacttgtacatgtgatgaccaatgacactctcatcagcacaatcgattagcgtgttcttgaagattggggtcatctctgagaagtagtcttttaagtgctctggtgtgcgaatatcacactcgaggaagccgaaaattttattagaaacgatgtcctcgacaatgccgtcataagcctcgatcgtagtcaatcgtccgcatggcatctcattaccaagtgcccataggtatagagcgttggcatcgtatccgataattttcttacagagcttacctccacgaatcttcgtctcgttgcgcttagcgtagcgattaaagataatagatggacctccagcaatgttggccttcatcttagcgtagatgcacttttcctccttatcaatgctatacaccaatctgtccgagttgaactcaagcaacttcttgtagcggaatcccttgagcgacatgtccttacgggcggtgttgcacttgatacagctaaccaatacgttgccatcgatgtgtccaagcttgttgttgatacggtctgctgaagcagtatcgacggtcagcgggcagtagcataaaccacacagatacttttgcttttgcagcaatgtattcaagtgagcaagtgtcataccaaattcccgctttgccttagcatcctgactcttgtagccacccatacgctggggtgaaaattggaatgcgttagcagctgtcttatccggatatcggagactgttaaagcaggtctgatacataactttttcactaagtcctggtaaggacacaccatcagcgaacatgtccagatcgaaacgcatgaatagctcgcgctgggctttaatagccttgatgaatgggactacatcgagattgttgtaccagaccagtaggtccttgatggatttcatctcatagtacttccacacgaacttcactcgctcgtattcatcatcgctgatgcttgttccacggagcttgctgtcaaaagctgacttaggcggaatagtagtctggttgagtacattgaacgcggtgatatactcatacgggaaaagacccttgccaagaccacagacacatctaattttgtcatcacatttgcagccaccgagatatgtcgtaagatacttatcgtagctggtaccagccggtacatagttgctaatatcgagcattttcatgttcgatgtagcaatgcacatgtagctggggttcttgataacagatttgatgttgtcagtaccaatgacggcgaataagtcgctcctgatcaagttgatatcgtatcgacccgaattgaagccgatcaatctgctgttttagtttcccgtaatcagatcttagcttaccaaagcctagactgctatgaaagtcaaagaaactggcatactttccttgttggatccaaccctcgacatcagacatcttgtaggtcttaccaagattgacgcctggaacttccatacctgtcagaccgtgggcattgatgattttttgcagaagcgacttatacttatcgacattgtatctttggatattttcaccaatagcgctgatgtagttgaacatatcctttagcaaagcctttggatcatcgttcacgaagcaacgaacctcctccgttaagctatcggctactgacaccgacaccggaatgtgctcgcttgtgaagacagtattttccccgtgcttagtagccgtaggcttgagaatagcctcaaagtcgtagacgatgaagtgatcaatgtactggtcagtacccttgatagaatacttcgtgagtagggagccaatggtattctgagcagggcgataaatcgttggggtagctgggaatgattcgacattgacaagctcacacttatttttggtatggttcttaagcttctcagaactaacaaagatcatatcacacttcgcacactgatatttacgctgaagcacgtccaggttcttaatgtattgagcataattatcgtgcgaaaggatgttgatcgaatcgtagtccatgtcggatcgacgaatgcagtcaacctttccagagtcaatatccatagtatagacattgatacttagtttgaagcactcctcaagctcgtcaaactgtagaatatcaataggcttgaagcttcgatacagaccgagggtgtaggtaatatccttgaatgcacagtattgttggaaagcctgcttcaccaacgactgaatcttccgtggatcctttttgggatcattatgcttgtggaaagcgatacagtgaaagacacatttgttgttcgtcttagggaagttaataacacttttattatctcgaataatcttcgggataactacttcactatctcccaaggcgtgctcgcgatgatatagaaaaatcttgaacccagtgatagccttgagctgatacccagagctggggtagttcagcttgtcagccatctccatagatcgaatctcagaaataaccttacgaatgtcgctcctgctgttgatggcaacaggtttgtcgaatacagaggtattgctgagatttgggtggaagtatctcgtgtctgaatcatcggttttgctaacaagatcgtacccgagggcaacatttaccttataagcacttttctgactctcaagaacgttctcgagcttgtcgtagaactcaccaggttcgatcccctcatataggtgggattccgtgtggttgcccttgtaaaagcgatagtgaggatcagccttatagtccgaagacaagtgcttctccagcttattgaggctgatcttgtactgcttagccaccagcttgaggttgctggggcgcgataggttgctaacatagaccatcttaccagtctctccgcgaaccttcacccggtagctactaccccatttaattgctcgaatatttaatctttttagtccttcaagctcgtatgcgaacatgcccgttataaatttacagctatattatcggtgtgatgactttataatattgagatcttgtatcaggaacgactttatatcactggcgacttttttcatctcaaaaaaaaaattaattagctaagttcggtttcagtgctaagttcggtttcagtgctaagttcgttgtcgctttgattaagttcgttttttggctttcgcttgcgagcacgaatttgctctcgattgttatcgtcgtagctctattgcgcgcttcgcgtgtgcgctggtagtagcgcttctgcgctgcgttaatgcgctccttgttagcttggtattgctcaggtgagtatgccgccatctttgtatattattcactttatatttatcagaatgaaaaataatttcaagctggcgcagcccagcatttttctgaattagattgctttaccaagacaggtaggcgcggataatatgttttaaagagaatctaccacgttcaatttttccagatattgttctgtcggattaataagcttttctttaacagtggccgtttgaagagaacctttatttgtgttatcaactaacaataggcaatttttcttcttcagcactgcgttcaaatttcccagatacgttgaaagcagcgaaacgatagagcccgcgcctatcgtggttcgatgatgtggcgggggcggtggtcgccaaacaccttccccgtattcttccgcaatttcaggtatgatttgtacgcgccaacgagactatctggcacacccttctcaagtaccgatttcttggtatgtccatagtttttccaacgctggaacaccttatcccggtaattcacatcccttcccatcttaagcaccttcagtgcaccgaacaaattctccccgctaaccctctcttcatcgtcgtgcttggtaattttgccttcgtcacccgtcgtctggtggcttcgaaggaatctcttgtcctcgccagagagaacacgcgaggagtgaacaacgtccacgttcaacacactggcctgatcggcatatgacactgctgtgccacttgcaaggaggacggtcgcaagaaccacaaggttcatgttgaagagacgcatggctggcagggtcttgaggccggagggaaattgcggaatgagaaatgcggcagttgtagtacaacttgtacgttgccctctcgagtgtctcatgagattactgtggcttacagtaatctctggtctcttttgtacgcaccagaaggtgcaagtggattcggagcagcagcaggagcatgtccgtatatgtattacagcccccacccttttgttttcccccttcaagtttctggagctatcctaaatattacatgtaggtttgtgagtgcggacaggatgcactacggagagaggatagatcatcgaggcaactgtgaagtgaccaacacgtattgacttcgagcatatttgttaagagttctacagttcagtaggttgagggtgtcggcaaaaacgttccaggattttcctcactggcaaattacgggaagaaaaaaaaactctcagcgtaataagctgcgcttaaagaaggttagcattttttttccttcgagtgattactcttttgcgcgtaatcccaacgatgctatgtgcggtgcttggaggtgtggaggagacctccttcgcaccagatgctacttagcggtgttgtagtcaatttcaacagctggtggtcaggaagcgctaaatctactctcgttggtaaattacgggaagaaaaaaaactggcggcgtaatgttccggatattactactctggtgagcgtcggcagtgggggcgagcatcgccatactggatagggccgaagccacggcgagggtcgacgcgaaagaagagaccattggaagacgaaggtgtcggaagttggcggtcggacggcaaaagcgagagtgatacggtagagtagcgaggacaggagaaagcgcttcgcttgcttgatgcaacaaagctgtgcagcatcgacggaatttctcggtggggtcgactagcgttcgccttgtttttccattgattcggaactgggattggcacgacacgcttttcggagttagagtgccgatgtgcacactgtacacatgcgataaccggaaattgagtccaaaaatgtagtagtaagtgactttatttggtcttggccattaaaatcctggtggtggtcttactgtttctttttcttctactgaacttcgatctcaagttggggtggtggcggcgaacaagctaataagttgggctgtgtcggcagccgcattggtgagattcggctttgagagacttgaggtagagtgctcagtttagtaattttgataaatacatctgggcgtctggtggatgagatcgtgggctcgagcgacgaaagtgatggcagcagaatggagattgaagacgctggcgtagagatggagatggtcagaggcattggggacggtggcatcattgagaaggctgaggctgtggtcatcgcttcctccgagcacgagtggcaagacgaggactttgaagatggaacttgtctcttgtcagactgcaccaacacggctcaagcgaacggcttctgctacgctcacggcggatatcaggtgtgctatgctcttggttgtaaccggagggctgctgtacgagcttttcatcgcaaacgcgccgtatccagcgacacgaatgatctgcacactgctgaatacgacggtaatggaaagagcgcgaagaaccaaaaggtgtgggtccaactcgactactgcgataagcacttggatgaagaggaactggatggagatcacgcagccgaagcatcgagtcaagcgcagccgcatgagaccatccgcgctaccgatcgtcgttatcgtcgccacagcgtgtgcaagtggcttgggtgtatgaagtgggtgatgagagatggagacccgagcgagtactgcgtccttcaccgagcccaagacggcagctcagtgatctcgagaggaagtagcgtggcatcattcacccactccgaggacgagtcgagtgttgagcaagtggaggccacggaattcaatggcgaaaaggacgtccagcgcgactacaaaagccccgtcctctgcaaagaaccaggatgcagcaagcagggatctgtctacggagacaagaggggctactgcttttaacacggcggtggcgtcacctgcatcgtaccaggatgccccaagcggcgtcaattgaaggggctatgccgagagcaagctttgcgtttgttcctgccgccgacagaagcacccccaccaccactcttcccccttgatacttttctgtaggtagacccggaaagaacgtatcttcagcgaaacaaacattgcagtgtagtctcaggtgctcgaccatagccttcttcattgcagcagtgtaaaatggtagggcccgcgtcgttttccacctgcctcgacctccagacaggcgagggtgacttggtggcgcccacgccgttgcagaaatgatcgcgcgctgagcggccgagagtgcaaaaattactggcttgaaactggtgtatccctcaacaagtcaagccctgtcaatctgaagacacaattgtgattggctaatactatcctgtatcccatacgtgggtgtatccctctacaaaacaaattcggtaaccagctcctggggttaacgttggacaagcactgccgaatggccaggttgctctctaccttgagctcagcttcgcacggggacaagggacattggtcacagtggatgagtccaaaaatgtaatggctcgctaacaacgaactgtaatgtatagtgtacattatgctttgcgcgtgccatgcaaatcttgctgccgtcgtagctgtacagtacgtaatggtcttgcgagcgttgcaatggacgactgcacattcccactcaaaatacgcagagcggttacccgccaggtggtgggcattgacttggttcgagcggatgtctgcccttggccagcaatgacacagcaatgggccgctgcagtgtacatgtatgcagcagtgttttgtgtgagagcgacatcaatatacatgtacattctcccaatcgtagccaatatgatgcacacttgggaggtgatatcgacagcggggccacgttaaattcctatattagccgtacaaaaaccaaaaacgggctgctggtacagaagtatgctcttgggatcgatttgcatattttgacaagcgttggtactttttagcatacatgtagttcgtatgggcttcctgtttggagccccagacaagaactgcttcgcgagcgtactgcactgtcgatagctccaccagctctgaaggcaagtcgaccacaacagtgcaatacttgtactcactgtcataagctgcatactaagacgtaagcacgattttagatccgcttaggttgtcatcgattccctttggaagatcatcgatccgcttcggtagtgtcatcgatccgcttgggtaaatcatcgatccgcttgggtatatcatcgatcagtttggttagatcatcaatctgcttgggtagatcatgcatccgcattatcaatagagtgtcatgcatttggttggcctctcatgagcctgcagtcgccactattttgtctttttttctacatgtatcgcaaggtattttacagctgacgataatgatcatgaatatgggtttcgcatgtacttctacctagctttcacgcctatactgaggtctaccgatatcattcttgcgtgcatatattagtgtaccgaaacgcatgcctaagtgtgaatgactgccggtggaacttactggtgagacttagtaaaacaagacacaaccgaccactgctcatagcgaagactcaagccagctccccgcatacttacaccccagatagctagctacaggtaggctacctacatgtatggaagccgttcattgtacgttagtattgtaccaacgtttgtcagtactgctgcgcctgtcctcgctccccgctgcagttagcgggaagcccgctgtcgatatcacctccctgcacacttgtggtcaattcctcgatgcagtatgttgtagctgaaaaggtcgattactgcaaggaagatcgcagaaaggtctgcatcatcatgcacttgttgctctttcgggctccttttgatccgtgctaagcaaagcggacatcagtgcgtggagtcggaagctactaaatagtctcgcattaaatgcgcttacggtatggtgtccgcttaacgtggccgctagtggacccacgattggttgattaatttgaaattatgtcctctcattggtcaactaataggtccgcaccggacctgcaaagaaatgtctggtagtgaaagggttaatatgtaatttgtgtcggactaaagttttgtcaaaaagcgtagtgggggctgatcttagggagtgcctcacgtggatggagcgcaccgtgacctgccttgctcctcctcgcatggcggacgtaactgtagactacccgcattaccgacatcgcggcgtgnnnnnnnnnnnnnnnnnnnnnnnnnnnnnnnnnnnnnnnnnnnnnnnnnnnnnnnnnnnnnnnnnnnnnnnnnnnnnnnnnnnnnnnnnnnnnnnnnnnnnnnnnnnnnnnnnnnnnnnnnnnnnnnnnnnnnnnnnnnnnnnnnnnnnnnnnnnnnnnnnnnnnnnnnnnnnnnnnnnnnnnnnnnnnnnnnnnnnnnnnnnnnnnnnnnnnnnnnnnnnnnnnnnnnnnnnnnnnnnnnnnnnnnnnnnnnnnnnnnnnnnnnnnnnnnnnnnnnnnnnnnnnnnnnnnnnnnnnnnnnnnnnnnnnnnnnnnnnnnnnnnnnnnnnnnnnnnnnnnnnnnnnnnnnnnnnnnnnnnnnnnnnnnnnnnnnnnnnnnnnnnnnnnnnnnnnnnnnnnnnnnnnnnnnnnnnnnnnnnnnnnnnnnnnnnnnnnnnnnnnnnnnnnnnnnnnnnnnnnnnnnnnnnnnnnnnnnnnnnnnnnnnnnnnnnnnnnnnnnnnnnnnnnnnnnnnnnnnnnnnnnnnnnnnnnnnnnnnnnnnnnnnnnnnnnnnnnnnnnnnnnnnnnnnnnnnnnnnnnnnnnnnnnnnnnnnnnnnnnnnnnnnnnnnnnnnnnnnnnnnnnnnnnnnnnnnnnnnnnnnnnnnnnnnnnnnnnnnnnnnnnnnnnnnnnnnnnnnnnnnnnnnnnnnnnnnnnnnnnnnnnnnnnnnnnnnnnnnnnnnnnnnnnnnnnnnnnnnnnnnnnnnnnnnnnnnnnnnnnnnnnnnnnnnnnnnnnnnnnnnnnnnnnnnnnnnnnnnnnnnnnnnnnnnnnnnnnnnnnnnnnnnnnnnnnnnnnnnnnnnnnnnnnnnnnnnnnnnnnnnnnnnnnnnnnnnnnnnnnnnnnnnnnnnnnnnnnnnnnnnnnnnnnnnnnnnnnnnnnnnnnnnnnnnnnnnnnnnnnnnnnnnnnnnnnnnnnnnnnnnnnnnnnnnnnnnnnnnnnnnnnnnnnnnnnnnnnnnnnnnnnnnnnnnnnnnnnnnnnnnnnnnnnnnnnnnnnnnnnnnnnnnnnnnnnnnnnnnnnnnnnnnnnnnnnnnnnnnnnnnnnnnnnnnnnnnnnnnnnnnnnnnnnnnnnnnnnnnnnnnnnnnnnnnnnnnnnnnnnnnnnnnnnnnnnnnnnnnnnnnnnnnnnnnnnnnnnnnnnnnnnnnnnnnnnnnnnnnnnnnnnnnnnnnnnnnnnnnnnnnnnnnnnnnnnnnnnnnnnnnnnnnnnnnnnnnnnnnnnnnnnnnnnnnnnnnnnnnnnnnnnnnnnnnnnnnnnnnnnnnnnnnnnnnnnnnnnnnnnnnnnnnnnnnnnnnnnnnnnnnnnnnnnnnnnnnnnnnnnnnnnnnnnnnnnnnnnnnnnnnnnnnnnnnnnnnnnnnnnnnnnnnnnnnnnnnnnnnnnnnnnnnnnnnnnnnnnnnnnnnnnnnnnnnnnnnnnnnnnnnnnnnnnnnnnnnnnnnnnnnnnnnnnnnnnnnnnnnnnnnnnnnnnnnnnnnnnnnnnnnnnnnnnnnnnnnnnnnnnnnnnnnnnnnnnnnnnnnnnnnnnnnnnnnnnnnnnnnnnnnnnnnnnnnnnnnnnnnnnnnnnnnnnnnnnnnnnnnnnnnnnnnnnnnnnnnnnnnnnnnnnnnnnnnnnnnnnnnnnnnnnnnnnnnnnnnnnnnnnnnnnnnnnnnnnnnnnnnnnnnnnnnnnnnnnnnnnnnnnnnnnnnnnnnnnnnnnnnnnnnnnnnnnnnnnnnnnnnnnnnnnnnnnnnnnnnnnnnnnnnnnnnnnnnnnnnnnnnnnnnnnnnnnnnnnnnnnnnnnnnnnnnnnnnnnnnnnnnnnnnnnnnnnnnnnnnnnnnnnnnnnnnnnnnnnnnnnnnnnnnnnnnnnnnnnnnnnnnnnnnnnnnnnnnnnnnnnnnnnnnnnnnnnnnnnnnnnnnnnnnnnnnnnnnnnnnnnnnnnnnnnnnnnnnnnnnnnnnnnnnnnnnnnnnnnnnnnnnnnnnnnnnnnnnnnnnnnnnnnnnnnnnnnnnnnnnnnnnnnnnnnnnnnnnnnnnnnnnnnnnnnnnnnnnnnnnnnnnnnnnnnnnnnnnnnnnnnnnnnnnnnnnnnnnnnnnnnnnnnnnnnnnnnnnnnnnnnnnnnnnnnnnnnnnnnnnnnnnnnnnnnnnnnnnnnnnnnnnnnnnnnnnnnnnnnnnnnnnnnnnnnnnnnnnnnnnnnnnnnnnnnnnnnnnnnnnnnnnnnnnnnnnnnnnnnnnnnnnnnnnnnnnnnnnnnnnnnnnnnnnnnnnnnnnnnnnnnnnnnnnnnnnnnnnnnnnnnnnnnnnnnnnnnnnnnnnnnnnnnnnnnnnnnnnnnnnnnnnnnnnnnnnnnnnnnnnnnnnnnnnnnnnnnnnnnnnnnnnnnnnnnnnnnnnnnnnnnnnnnnnnnnnnnnnnnnnnnnnnnnnnnnnnnnnnnnnnnnnnnnnnnnnnnnnnnnnnnnnnnnnnnnnnnnnnnnnnnnnnnnnnnnnnnnnnnnnnnnnnnnnnnnnnnnnnnnnnnnnnnnnnnnnnnnnnnnnnnnnnnnnnnnnnnnnnnnnnnnnnnnnnnnnnnnnnnnnnnnnnnnnnnnnnnnnnnnnnnnnnnnnnnnnnnnnnnnnnnnnnnnnnnnnnnnnnnnnnnnnnnnnnnnnnnnnnnnnnnnnnnnnnnnnnnnnnnnnnnnnnnnnnnnnnnnnnnnnnnnnnnnnnnnnnnnnnnnnnnnnnnnnnnnnnnnnnnnnnnnnnnnnnnnnnnnnnnnnnnnnnnnnnnnnnnnnnnnnnnnnnnnnnnnnnnnnnnnnnnnnnnnnnnnnnnnnnnnnnnnnnnnnnnnnnnnnnnnnnnnnnnnnnnnnnnnnnnnnnnnnnnnnnnnnnnnnnnnnnnnnnnnnnnnnnnnnnnnnnnnnnnnnnnnnnnnnnnnnnnnnnnnnnnnnnnnnnnnnnnnnnnnnnnnnnnnnnnnnnnnnnnnnnnnnnnnnnnnnnnnnnnnnnnnnnnnnnnnnnnnnnnnnnnnnnnnnnnnnnnnnnnnnnnnnnnnnnnnnnnnnnnnnnnnnnnnnnnnnnnnnnnnnnnnnnnnnnnnnnnnnnnnnnnnnnnnnnnnnnnnnnnnnnnnnnnnnnnnnnnnnnnnnnnnnnnnnnnnnnnnnnnnnnnnnnnnnnnnnnnnnnnnnnnnnnnnnnnnnnnnnnnnnnnnnnnnnnnnnnnnnnnnnnnnnnnnnnnnnnnnnnnnnnnnnnnnnnnnnnnnnnnnnnnnnnnnnnnnnnnnnnnnnnnnnnnnnnnnnnnnnnnnnnnnnnnnnnnnnnnnnnnnnnnnnnnnnnnnnnnnnnnnnnnnnnnnnnnnnnnnnnnnnnnnnnnnnnnnnnnnnnnnnnnnnnnnnnnnnnnnnnnnnnnnnnnnnnnnnnnnnnnnnnnnnnnnnnnnnnnnnnnnnnnnnnnnnnnnnnnnnnnnnnnnnnnnnnnnnnnnnnnnnnnnnnnnnnnnnnnnnnnnnnnnnnnnnnnnnnnnnnnnnnnnnnnnnnnnnnnnnnnnnnnnnnnnnnnnnnnnnnnnnnnnnnnnnnnnnnnnnnnnnnnnnnnnnnnnnnnnnnnnnnnnnnnnnnnnnnnnnnnnnnnnnnnnnnnnnnnnnnnnnnnnnnnnnnnnnnnnnnnnnnnnnnnnnnnnnnnnnnnnnnnnnnnnnnnnnnnnnnnnnnnnnnnnnnnnnnnnnnnnnnnnnnnnnnnnnnnnnnnnnnnnnnnnnnnnnnnnnnnnnnnnnnnnnnnnnnnnnnnnnnnnnnnnnnnnnnnnnnnnnnnnnnnnnnnnnnnnnnnnnnnnnnnnnnnnnnnnnnnnnnnnnnnnnnnnnnnnnnnnnnnnnnnnnnnnnnnnnnnnnnnnnnnnnnnnnnnnnnnnnnnnnnnnnnnnnnnnnnnnnnnnnnnnnnnnnnnnnnnnnnnnnnnnnnnnnnnnnnnnnnnnnnnnnnnnnnnnnnnnnnnnnnnnnnnnnnnnnnnnnnnnnnnnnnnnnnnnnnnnnnnnnnnnnnnnnnnnnnnnnnnnnnnnnnnnnnnnnnnnnnnnnnnnnnnnnnnnnnnnnnnnnnnnnnnnnnnnnnnnnnnnnnnnnnnnnnnnnnnnnnnnnnnnnnnnnnnnnnnnnnnnnnnnnnnnnnnnnnnnnnnnnnnnnnnnnnnnnnnnnnnnnnnnnnnnnnnnnnnnnnnnnnnnnnnnnnnnnnnnnnnnnnnnnnnnnnnnnnnnnnnnnnnnnnnnnnnnnnnnnnnnnnnnnnnnnnnnnnnnnnnnnnnnnnnnnnnnnnnnnnnnnnnnnnnnnnnnnnnnnnnnnnnnnnnnnnnnnnnnnnnnnnnnnnnnnnnnnnnnnnnnnnnnnnnnnnnnnnnnnnnnnnnnnnnnnnnnnnnnnnnnnnnnnnnnnnnnnnnnnnnnnnnnnnnnnnnnnnnnnnnnnnnnnnnnnnnnnnnnnnnnnnnnnnnnnnnnnnnnnnnnnnnnnnnnnnnnnnnnnnnnnnnnnnnnnnnnnnnnnnnnnnnnnnnnnnnnnnnnnnnnnnnnnnnnnnnnnnnnnnnnnnnnnnnnnnnnnnnnnnnnnnnnnnnnnnnnnnnnnnnnnnnnnnnnnnnnnnnnnnnnnnnnnnnnnnnnnnnnnnnnnnnnnnnnnnnnnnnnnnnnnnnnnnnnnnnnnnnnnnnnnnnnnnnnnnnnnnnnnnnnnnnnnnnnnnnnnnnnnnnnnnnnnnnnnnnnnnnnnnnnnnnnnnnnnnnnnnnnnnnnnnnnnnnnnnnnnnnnnnnnnnnnnnnnnnnnnnnnnnnnnnnnnnnnnnnnnnnnnnnnnnnnnnnnnnnnnnnnnnnnnnnnnnnnnnnnnnnnnnnnnnnnnnnnnnnnnnnnnnnnnnnnnnnnnnnnnnnnnnnnnnnnnnnnnnnnnnnnnnnnnnnnnnnnnnnnnnnnnnnnnnnnnnnnnnnnnnnnnnnnnnnnnnnnnnnnnnnnnnnnnnnnnnnnnnnnnnnnnnnnnnnnnnnnnnnnnnnnnnnnnnnnnnnnnnnnnnnnnnnnnnnnnnnnnnnnnnnnnnnnnnnnnnnnnnnnnnnnnnnnnnnnnnnnnnnnnnnnnnnnnnnnnnnnnnnnnnnnnnnnnnnnnnnnnnnnnnnnnnnnnnnnnnnnnnnnnnnnnnnnnnnnnnnnnnnnnnnnnnnnnnnnnnnnnnnnnnnnnnnnnnnnnnnnnnnnnnnnnnnnnnnnnnnnnnnnnnnnnnnnnnnnnnnnnnnnnnnnnnnnnnnnnnnnnnnnnnnnnnnnnnnnnnnnnnnnnnnnnnnnnnnnnnnnnnnnnnnnnnnnnnnnnnnnnnnnnnnnnnnnnnnnnnnnnnnnnnnnnnnnnnnnnnnnnnnnnnnnnnnnnnnnnnnnnnnnnnnnnnnnnnnnnnnnnnnnnnnnnnnnnnnnnnnnnnnnnnnnnnnnnnnnnnnnnnnnnnnnnnnnnnnnnnnnnnnnnnnnnnnnnnnnnnnnnnnnnnnnnnnnnnnnnnnnnnnnnnnnnnnnnnnnnnnnnnnnnnnnnnnnnnnnnnnnnnnnnnnnnnnnnnnnnnnnnnnnnnnnnnnnnnnnnnnnnnnnnnnnnnnnnnnnnnnnnnnnnnnnnnnnnnnnnnnnnnnnnnnnnnnnnnnnnnnnnnnnnnnnnnnnnnnnnnnnnnnnnnnnnnnnnnnnnnnnnnnnnnnnnnnnnnnnnnnnnnnnnnnnnnnnnnnnnnnnnnnnnnnnnnnnnnnnnnnnnnnnnnnnnnnnnnnnnnnnnnnnnnnnnnnnnnnnnnnnnnnnnnnnnnnnnnnnnnnnnnnnnnnnnnnnnnnnnnnnnnnnnnnnnnnnnnnnnnnnnnnnnnnnnnnnnnnnnnnnnnnnnnnnnnnnnnnnnnnnnnnnnnnnnnnnnnnnnnnnnnnnnnnnnnnnnnnnnnnnnnnnnnnnnnnnnnnnnnnnnnnnnnnnnnnnnnnnnnnnnnnnnnnnnnnnnnnnnnnnnnnnnnnnnnnnnnnnnnnnnnnnnnnnnnnnnnnnnnnnnnnnnnnnnnnnnnnnnnnnnnnnnnnnnnnnnnnnnnnnnnnnnnnnnnnnnnnnnnnnnnnnnnnnnnnnnnnnnnnnnnnnnnnnnnnnnnnnnnnnnnnnnnnnnnnnnnnnnnnnnnnnnnnnnnnnnnnnnnnnnnnnnnnnnnnnnnnnnnnnnnnnnnnnnnnnnnnnnnnnnnnnnnnnnnnnnnnnnnnnnnnnnnnnnnnnnnnnnnnnnnnnnnnnnnnnnnnnnnnnnnnnnnnnnnnnnnnnnnnnnnnnnnnnnnnnnnnnnnnnnnnnnnnnnnnnnnnnnnnnnnnnnnnnnnnnnnnnnnnnnnnnnnnnnnnnnnnnnnnnnnnnnnnnnnnnnnnnnnnnnnnnnnnnnnnnnnnnnnnnnnnnnnnnnnnnnnnnnnnnnnnnnnnnnnnnnnnnnnnnnnnnnnnnnnnnnnnnnnnnnnnnnnnnnnnnnnnnnnnnnnnnnnnnnnnnnnnnnnnnnnnnnnnnnnnnnnnnnnnnnnnnnnnnnnnnnnnnnnnnnnnnnnnnnnnnnnnnnnnnnnnnnnnnnnnnnnnnnnnnnnnnnnnnnnnnnnnnnnnnnnnnnnnnnnnnnnnnnnnnnnnnnnnnnnnnnnnnnnnnnnnnnnnnnnnnnnnnnnnnnnnnnnnnnnnnnnnnnnnnnnnnnnnnnnnnnnnnnnnnnnnnnnnnnnnnnnnnnnnnnnnnnnnnnnnnnnnnnnnnnnnnnnnnnnnnnnnnnnnnnnnnnnnnnnnnnnnnnnnnnnnnnnnnnnnnnnnnnnnnnnnnnnnnnnnnnnnnnnnnnnnnnnnnnnnnnnnnnnnnnnnnnnnnnnnnnnnnnnnnnnnnnnnnnnnnnnnnnnnnnnnnnnnnnnnnnnnnnnnnnnnnnnnnnnnnnnnnnnnnnnnnnnnnnnnnnnnnnnnnnnnnnnnnnnnnnnnnnnnnnnnnnnnnnnnnnnnnnnnnnnnnnnnnnnnnnnnnnnnnnnnnnnnnnnnnnnnnnnnnnnnnnnnnnnnnnnnnnnnnnnnnnnnnnnnnnnnnnnnnnnnnnnnnnnnnnnnnnnnnnnnnnnnnnnnnnnnnnnnnnnnnnnnnnnnnnnnnnnnnnnnnnnnnnnnnnnnnnnnnnnnnnnnnnnnnnnnnnnnnnnnnnnnnnnnnnnnnnnnnnnnnnnnnnnnnnnnnnnnnnnnnnnnnnnnnnnnnnnnnnnnnnnnnnnnnnnnnnnnnnnnnnnnnnnnnnnnnnnnnnnnnnnnnnnnnnnnnnnnnnnnnnnnnnnnnnnnnnnnnnnnnnnnnnnnnnnnnnnnnnnnnnnnnnnnnnnnnnnnnnnnnnnnnnnnnnnnnnnnnnnnnnnnnnnnnnnnnnnnnnnnnnnnnnnnnnnnnnnnnnnnnnnnnnnnnnnnnnnnnnnnnnnnnnnnnnnnnnnnnnnnnnnnnnnnnnnnnnnnnnnnnnnnnnnnnnnnnnnnnnnnnnnnnnnnnnnnnnnnnnnnnnnnnnnnnnnnnnnnnnnnnnnnnnnnnnnnnnnnnnnnnnnnnnnnnnnnnnnnnnnnnnnnnnnnnnnnnnnnnnnnnnnnnnnnnnnnnnnnnnnnnnnnnnnnnnnnnnnnnnnnnnnnnnnnnnnnnnnnnnnnnnnnnnnnnnnnnnnnnnnnnnnnnnnnnnnnnnnnnnnnnnnnnnnnnnnnnnnnnnnnnnnnnnnnnnnnnnnnnnnnnnnnnnnnnnnnnnnnnnnnnnnnnnnnnnnnnnnnnnnnnnnnnnnnnnnnnnnnnnnnnnnnnnnnnnnnnnnnnnnnnnnnnnnnnnnnnnnnnnnnnnnnnnnnnnnnnnnnnnnnnnnnnnnnnnnnnnnnnnnnnnnnnnnnnnnnnnnnnnnnnnnnnnnnnnnnnnnnnnnnnnnnnnnnnnnnnnnnnnnnnnnnnnnnnnnnnnnnnnnnnnnnnnnnnnnnnnnnnnnnnnnnnnnnnnnnnnnnnnnnnnnnnnnnnnnnnnnnnnnnnnnnnnnnnnnnnnnnnnnnnnnnnnnnnnnnnnnnnnnnnnnnnnnnnnnnnnnnnnnnnnnnnnnnnnnnnnnnnnnnnnnnnnnnnnnnnnnnnnnnnnnnnnnnnnnnnnnnnnnnnnnnnnnnnnnnnnnnnnnnnnnnnnnnnnnnnnnnnnnnnnnnnnnnnnnnnnnnnnnnnnnnnnnnnnnnnnnnnnnnnnnnnnnnnnnnnnnnnnnnnnnnnnnnnnnnnnnnnnnnnnnnnnnnnnnnnnnnnnnnnnnnnnnnnnnnnnnnnnnnnnnnnnnnnnnnnnnnnnnnnnnnnnnnnnnnnnnnnnnnnnnnnnnnnnnnnnnnnnnnnnnnnnnnnnnnnnnnnnnnnnnnnnnnnnnnnnnnnnnnnnnnnnnnnnnnnnnnnnnnnnnnnnnnnnnnnnnnnnnnnnnnnnnnnnnnnnnnnnnnnnnnnnnnnnnnnnnnnnnnnnnnnnnnnnnnnnnnnnnnnnnnnnnnnnnnnnnnnnnnnnnnnnnnnnnnnnnnnnnnnnnnnnnnnnnnnnnnnnnnnnnnnnnnnnnnnnnnnnnnnnnnnnnnnnnnnnnnnnnnnnnnnnnnnnnnnnnnnnnnnnnnnnnnnnnnnnnnnnnnnnnnnnnnnnnnnnnnnnnnnnnnnnnnnnnnnnnnnnnnnnnnnnnnnnnnnnnnnnnnnnnnnnnnnnnnnnnnnnnnnnnnnnnnnnnnnnnnnnnnnnnnnnnnnnnnnnnnnnnnnnnnnnnnnnnnnnnnnnnnnnnnnnnnnnnnnnnnnnnnnnnnnnnnnnnnnnnnnnnnnnnnnnnnnnnnnnnnnnnnnnnnnnnnnnnnnnnnnnnnnnnnnnnnnnnnnnnnnnnnnnnnnnnnnnnnnnnnnnnnnnnnnnnnnnnnnnnnnnnnnnnnnnnnnnnnnnnnnnnnnnnnnnnnnnnnnnnnnnnnnnnnnnnnnnnnnnnnnnnnnnnnnnnnnnnnnnnnnnnnnnnnnnnnnnnnnnnnnnnnnnnnnnnnnnnnnnnnnnnnnnnnnnnnnnnnnnnnnnnnnnnnnnnnnnnnnnnnnnnnnnnnnnnnnnnnnnnnnnnnnnnnnnnnnnnnnnnnnnnnnnnnnnnnnnnnnnnnnnnnnnnnnnnnnnnnnnnnnnnnnnnnnnnnnnnnnnnnnnnnnnnnnnnnnnnnnnnnnnnnnnnnnnnnnnnnnnnnnnnnnnnnnnnnnnnnnnnnnnnnnnnnnnnnnnnnnnnnnnnnnnnnnnnnnnnnnnnnnnnnnnnnnnnnnnnnnnnnnnnnnnnnnnnnnnnnnnnnnnnnnnnnnnnnnnnnnnnnnnnnnnnnnnnnnnnnnnnnnnnnnnnnnnnnnnnnnnnnnnnnnnnnnnnnnnnnnnnnnnnnnnnnnnnnnnnnnnnnnnnnnnnnnnnnnnnnnnnnnnnnnnnnnnnnnnnnnnnnnnnnnnnnnnnnnnnnnnnnnnnnnnnnnnnnnnnnnnnnnnnnnnnnnnnnnnnnnnnnnnnnnnnnnnnnnnnnnnnnnnnnnnnnnnnnnnnnnnnnnnnnnnnnnnnnnnnnnnnnnnnnnnnnnnnnnnnnnnnnnnnnnnnnnnnnnnnnnnnnnnnnnnnnnnnnnnnnnnnnnnnnnnnnnnnnnnnnnnnnnnnnnnnnnnnnnnnnnnnnnnnnnnnnnnnnnnnnnnnnnnnnnnnnnnnnnnnnnnnnnnnnnnnnnnnnnnnnnnnnnnnnnnnnnnnnnnnnnnnnnnnnnnnnnnnnnnnnnnnnnnnnnnnnnnnnnnnnnnnnnnnnnnnnnnnnnnnnnnnnnnnnnnnnnnnnnnnnnnnnnnnnnnnnnnnnnnnnnnnnnnnnnnnnnnnnnnnnnnnnnnnnnnnnnnnnnnnnnnnnnnnnnnnnnnnnnnnnnnnnnnnnnnnnnnnnnnnnnnnnnnnnnnnnnnnnnnnnnnnnnnnnnnnnnnnnnnnnnnnnnnnnnnnnnnnnnnnnnnnnnnnnnnnnnnnnnnnnnnnnnnnnnnnnnnnnnnnnnnnnnnnnnnnnnnnnnnnnnnnnnnnnnnnnnnnnnnnnnnnnnnnnnnnnnnnnnnnnnnnnnnnnnnnnnnnnnnnnnnnnnnnnnnnnnnnnnnnnnnnnnnnnnnnnnnnnnnnnnnnnnnnnnnnnnnnnnnnnnnnnnnnnnnnnnnnnnnnnnnnnnnnnnnnnnnnnnnnnnnnnnnnnnnnnnnnnnnnnnnnnnnnnnnnnnnnnnnnnnnnnnnnnnnnnnnnnnnnnnnnnnnnnnnnnnnnnnnnnnnnnnnnnnnnnnnnnnnnnnnnnnnnnnnnnnnnnnnnnnnnnnnnnnnnnnnnnnnnnnnnnnnnnnnnnnnnnnnnnnnnnnnnnnnnnnnnnnnnnnnnnnnnnnnnnnnnnnnnnnnnnnnnnnnnnnnnnnnnnnnnnnnnnnnnnnnnnnnnnnnnnnnnnnnnnnnnnnnnnnnnnnnnnnnnnnnnnnnnnnnnnnnnnnnnnnnnnnnnnnnnnnnnnnnnnnnnnnnnnnnnnnnnnnnnnnnnnnnnnnnnnnnnnnnnnnnnnnnnnnnnnnnnnnnnnnnnnnnnnnnnnnnnnnnnnnnnnnnnnnnnnnnnnnnnnnnnnnnnnnnnnnnnnnnnnnnnnnnnnnnnnnnnnnnnnnnnnnnnnnnnnnnnnnnnnnnnnnnnnnnnnnnnnnnnnnnnnnnnnnnnnnnnnnnnnnnnnnnnnnnnnnnnnnnnnnnnnnnnnnnnnnnnnnnnnnnnnnnnnnnnnnnnnnnnnnnnnnnnnnnnnnnnnnnnnnnnnnnnnnnnnnnnnnnnnnnnnnnnnnnnnnnnnnnnnnnnnnnnnnnnnnnnnnnnnnnnnnnnnnnnnnnnnnnnnnnnnnnnnnnnnnnnnnnnnnnnnnnnnnnnnnnnnnnnnnnnnnnnnnnnnnnnnnnnnnnnnnnnnnnnnnnnnnnnnnnnnnnnnnnnnnnnnnnnnnnnnnnnnnnnnnnnnnnnnnnnnnnnnnnnnnnnnnnnnnnnnnnnnnnnnnnnnnnnnnnnnnnnnnnnnnnnnnnnnnnnnnnnnnnnnnnnnnnnnnnnnnnnnnnnnnnnnnnnnnnnnnnnnnnnnnnnnnnnnnnnnnnnnnnnnnnnnnnnnnnnnnnnnnnnnnnnnnnnnnnnnnnnnnnnnnnnnnnnnnnnnnnnnnnnnnnnnnnnnnnnnnnnnnnnnnnnnnnnnnnnnnnnnnnnnnnnnnnnnnnnnnnnnnnnnnnnnnnnnnnnnnnnnnnnnnnnnnnnnnnnnnnnnnnnnnnnnnnnnnnnnnnnnnnnnnnnnnnnnnnnnnnnnnnnnnnnnnnnnnnnnnnnnnnnnnnnnnnnnnnnnnnnnnnnnnnnnnnnnnnnnnnnnnnnnnnnnnnnnnnnnnnnnnnnnnnnnnnnnnnnnnnnnnnnnnnnnnnnnnnnnnnnnnnnnnnnnnnnnnnnnnnnnnnnnnnnnnnnnnnnnnnnnnnnnnnnnnnnnnnnnnnnnnnnnnnnnnnnnnnnnnnnnnnnnnnnnnnnnnnnnnnnnnnnnnnnnnnnnnnnnnnnnnnnnnnnnnnnnnnnnnnnnnnnnnnnnnnnnnnnnnnnnnnnnnnnnnnnnnnnnnnnnnnnnnnnnnnnnnnnnnnnnnnnnnnnnnnnnnnnnnnnnnnnnnnnnnnnnnnnnnnnnnnnnnnnnnnnnnnnnnnnnnnnnnnnnnnnnnnnnnnnnnnnnnnnnnnnnnnnnnnnnnnnnnnnnnnnnnnnnnnnnnnnnnnnnnnnnnnnnnnnnnnnnnnnnnnnnnnnnnnnnnnnnnnnnnnnnnnnnnnnnnnnnnnnnnnnnnnnnnnnnnnnnnnnnnnnnnnnnnnnnnnnnnnnnnnnnnnnnnnnnnnnnnnnnnnnnnnnnnnnnnnnnnnnnnnnnnnnnnnnnnnnnnnnnnnnnnnnnnnnnnnnnnnnnnnnnnnnnnnnnnnnnnnnnnnnnnnnnnnnnnnnnnnnnnnnnnnnnnnnnnnnnnnnnnnnnnnnnnnnnnnnnnnnnnnnnnnnnnnnnnnnnnnnnnnnnnnnnnnnnnnnnnnnnnnnnnnnnnnnnnnnnnnnnnnnnnnnnnnnnnnnnnnnnnnnnnnnnnnnnnnnnnnnnnnnnnnnnnnnnnnnnnnnnnnnnnnnnnnnnnnnnnnnnnnnnnnnnnnnnnnnnnnnnnnnnnnnnnnnnnnnnnnnnnnnnnnnnnnnnnnnnnnnnnnnnnnnnnnnnnnnnnnnnnnnnnnnnnnnnnnnnnnnnnnnnnnnnnnnnnnnnnnnnnnnnnnnnnnnnnnnnnnnnnnnnnnnnnnnnnnnnnnnnnnnnnnnnnnnnnnnnnnnnnnnnnnnnnnnnnnnnnnnnnnnnnnnnnnnnnnnnnnnnnnnnnnnnnnnnnnnnnnnnnnnnnnnnnnnnnnnnnnnnnnnnnnnnnnnnnnnnnnnnnnnnnnnnnnnnnnnnnnnnnnnnnnnnnnnnnnnnnnnnnnnnnnnnnnnnnnnnnnnnnnnnnnnnnnnnnnnnnnnnnnnnnnnnnnnnnnnnnnnnnnnnnnnnnnnnnnnnnnnnnnnnnnnnnnnnnnnnnnnnnnnnnnnnnnnnnnnnnnnnnnnnnnnnnnnnnnnnnnnnnnnnnnnnnnnnnnnnnnnnnnnnnnnnnnnnnnnnnnnnnnnnnnnnnnnnnnnnnnnnnnnnnnnnnnnnnnnnnnnnnnnnnnnnnnnnnnnnnnnnnnnnnnnnnnnnnnnnnnnnnnnnnnnnnnnnnnnnnnnnnnnnnnnnnnnnnnnnnnnnnnnnnnnnnnnnnnnnnnnnnnnnnnnnnnnnnnnnnnnnnnnnnnnnnnnnnnnnnnnnnnnnnnnnnnnnnnnnnnnnnnnnnnnnnnnnnnnnnnnnnnnnnnnnnnnnnnnnnnnnnnnnnnnnnnnnnnnnnnnnnnnnnnnnnnnnnnnnnnnnnnnnnnnnnnnnnnnnnnnnnnnnnnnnnnnnnnnnnnnnnnnnnnnnnnnnnnnnnnnnnnnnnnnnnnnnnnnnnnnnnnnnnnnnnnnnnnnnnnnnnnnnnnnnnnnnnnnnnnnnnnnnnnnnnnnnnnnnnnnnnnnnnnnnnnnnnnnnnnnnnnnnnnnnnnnnnnnnnnnnnnnnnnnnnnnnnnnnnnnnnnnnnnnnnnnnnnnnnnnnnnnnnnnnnnnnnnnnnnnnnnnnnnnnnnnnnnnnnnnnnnnnnnnnnnnnnnnnnnnnnnnnnnnnnnnnnnnnnnnnnnnnnnnnnnnnnnnnnnnnnnnnnnnnnnnnnnnnnnnnnnnnnnnnnnnnnnnnnnnnnnnnnnnnnnnnnnnnnnnnnnnnnnnnnnnnnnnnnnnnnnnnnnnnnnnnnnnnnnnnnnnnnnnnnnnnnnnnnnnnnnnnnnnnnnnnnnnnnnnnnnnnnnnnnnnnnnnnnnnnnnnnnnnnnnnnnnnnnnnnnnnnnnnnnnnnnnnnnnnnnnnnnnnnnnnnnnnnnnnnnnnnnnnnnnnnnnnnnnnnnnnnnnnnnnnnnnnnnnnnnnnnnnnnnnnnnnnnnnnnnnnnnnnnnnnnnnnnnnnnnnnnnnnnnnnnnnnnnnnnnnnnnnnnnnnnnnnnnnnnnnnnnnnnnnnnnnnnnnnnnnnnnnnnnnnnnnnnnnnnnnnnnnnnnnnnnnnnnnnnnnnnnnnnnnnnnnnnnnnnnnnnnnnnnnnnnnnnnnnnnnnnnnnnnnnnnnnnnnnnnnnnnnnnnnnnnnnnnnnnnnnnnnnnnnnnnnnnnnnnnnnnnnnnnnnnnnnnnnnnnnnnnnnnnnnnnnnnnnnnnnnnnnnnnnnnnnnnnnnnnnnnnnnnnnnnnnnnnnnnnnnnnnnnnnnnnnnnnnnnnnnnnnnnnnnnnnnnnnnnnnnnnnnnnnnnnnnnnnnnnnnnnnnnnnnnnnnnnnnnnnnnnnnnnnnnnnnnnnnnnnnnnnnnnnnnnnnnnnnnnnnnnnnnnnnnnnnnnnnnnnnnnnnnnnnnnnnnnnnnnnnnnnnnnnnnnnnnnnnnnnnnnnnnnnnnnnnnnnnnnnnnnnnnnnnnnnnnnnnnnnnnnnnnnnnnnnnnnnnnnnnnnnnnnnnnnnnnnnnnnnnnnnnnnnnnnnnnnnnnnnnnnnnnnnnnnnnnnnnnnnnnnnnnnnnnnnnnnnnnnnnnnnnnnnnnnnnnnnnnnnnnnnnnnnnnnnnnnnnnnnnnnnnnnnnnnnnnnnnnnnnnnnnnnnnnnnnnnnnnnnnnnnnnnnnnnnnnnnnnnnnnnnnnnnnnnnnnnnnnnnnnnnnnnnnnnnnnnnnnnnnnnnnnnnnnnnnnnnnnnnnnnnnnnnnnnnnnnnnnnnnnnnnnnnnnnnnnnnnnnnnnnnnnnnnnnnnnnnnnnnnnnnnnnnnnnnnnnnnnnnnnnnnnnnnnnnnnnnnnnnnnnnnnnnnnnnnnnnnnnnnnnnnnnnnnnnnnnnnnnnnnnnnnnnnnnnnnnnnnnnnnnnnnnnnnnnnnnnnnnnnnnnnnnnnnnnnnnnnnnnnnnnnnnnnnnnnnnnnnnnnnnnnnnnnnnnnnnnnnnnnnnnnnnnnnnnnnnnnnnnnnnnnnnnnnnnnnnnnnnnnnnnnnnnnnnnnnnnnnnnnnnnnnnnnnnnnnnnnnnnnnnnnnnnnnnnnnnnnnnnnnnnnnnnnnnnnnnnnnnnnnnnnnnnnnnnnnnnnnnnnnnnnnnnnnnnnnnnnnnnnnnnnnnnnnnnnnnnnnnnnnnnnnnnnnnnnnnnnnnnnnnnnnnnnnnnnnnnnnnnnnnnnnnnnnnnnnnnnnnnnnnnnnnnnnnnnnnnnnnnnnnnnnnnnnnnnnnnnnnnnnnnnnnnnnnnnnnnnnnnnnnnnnnnnnnnnnnnnnnnnnnnnnnnnnnnnnnnnnnnnnnnnnnnnnnnnnnnnnnnnnnnnnnnnnnnnnnnnnnnnnnnnnnnnnnnnnnnnnnnnnnnnnnnnnnnnnnnnnnnnnnnnnnnnnnnnnnnnnnnnnnnnnnnnnnnnnnnnnnnnnnnnnnnnnnnnnnnnnnnnnnnnnnnnnnnnnnnnnnnnnnnnnnnnnnnnnnnnnnnnnnnnnnnnnnnnnnnnnnnnnnnnnnnnnnnnnnnnnnnnnnnnnnnnnnnnnnnnnnnnnnnnnnnnnnnnnnnnnnnnnnnnnnnnnnnnnnnnnnnnnnnnnnnnnnnnnnnnnnnnnnnnnnnnnnnnnnnnnnnnnnnnnnnnnnnnnnnnnnnnnnnnnnnnnnnnnnnnnnnnnnnnnnnnnnnnnnnnnnnnnnnnnnnnnnnnnnnnnnnnnnnnnnnnnnnnnnnnnnnnnnnnnnnnnnnnnnnnnnnnnnnnnnnnnnnnnnnnnnnnnnnnnnnnnnnnnnnnnnnnnnnnnnnnnnnnnnnnnnnnnnnnnnnnnnnnnnnnnnnnnnnnnnnnnnnnnnnnnnnnnnnnnnnnnnnnnnnnnnnnnnnnnnnnnnnnnnnnnnnnnnnnnnnnnnnnnnnnnnnnnnnnnnnnnnnnnnnnnnnnnnnnnnnnnnnnnnnnnnnnnnnnnnnnnnnnnnnnnnnnnnnnnnnnnnnnnnnnnnnnnnnnnnnnnnnnnnnnnnnnnnnnnnnnnnnnnnnnnnnnnnnnnnnnnnnnnnnnnnnnnnnnnnnnnnnnnnnnnnnnnnnnnnnnnnnnnnnnnnnnnnnnnnnnnnnnnnnnnnnnnnnnnnnnnnnnnnnnnnnnnnnnnnnnnnnnnnnnnnnnnnnnnnnnnnnnnnnnnnnnnnnnnnnnnnnnnnnnnnnnnnnnnnnnnnnnnnnnnnnnnnnnnnnnnnnnnnnnnnnnnnnnnnnnnnnnnnnnnnnnnnnnnnnnnnnnnnnnnnnnnnnnnnnnnnnnnnnnnnnnnnnnnnnnnnnnnnnnnnnnnnnnnnnnnnnnnnnnnnnnnnnnnnnnnnnnnnnnnnnnnnnnnnnnnnnnnnnnnnnnnnnnnnnnnnnnnnnnnnnnnnnnnnnnnnnnnnnnnnnnnnnnnnnnnnnnnnnnnnnnnnnnnnnnnnnnnnnnnnnnnnnnnnnnnnnnnnnnnnnnnnnnnnnnnnnnnnnnnnnnnnnnnnnnnnnnnnnnnnnnnnnnnnnnnnnnnnnnnnnnnnnnnnnnnnnnnnnnnnnnnnnnnnnnnnnnnnnnnnnnnnnnnnnnnnnnnnnnnnnnnnnnnnnnnnnnnnnnnnnnnnnnnnnnnnnnnnnnnnnnnnnnnnnnnnnnnnnnnnnnnnnnnnnnnnnnnnnnnnnnnnnnnnnnnnnnnnnnnnnnnnnnnnnnnnnnnnnnnnnnnnnnnnnnnnnnnnnnnnnnnnnnnnnnnnnnnnnnnnnnnnnnnnnnnnnnnnnnnnnnnnnnnnnnnnnnnnnnnnnnnnnnnnnnnnnnnnnnnnnnnnnnnnnnnnnnnnnnnnnnnnnnnnnnnnnnnnnnnnnnnnnnnnnnnnnnnnnnnnnnnnnnnnnnnnnnnnnnnnnnnnnnnnnnnnnnnnnnnnnnnnnnnnnnnnnnnnnnnnnnnnnnnnnnnnnnnnnnnnnnnnnnnnnnnnnnnnnnnnnnnnnnnnnnnnnnnnnnnnnnnnnnnnnnnnnnnnnnnnnnnnnnnnnnnnnnnnnnnnnnnnnnnnnnnnnnnnnnnnnnnnnnnnnnnnnnnnnnnnnnnnnnnnnnnnnnnnnnnnnnnnnnnnnnnnnnnnnnnnnnnnnnnnnnnnnnnnnnnnnnnnnnnnnnnnnnnnnnnnnnnnnnnnnnnnnnnnnnnnnnnnnnnnnnnnnnnnnnnnnnnnnnnnnnnnnnnnnnnnnnnnnnnnnnnnnnnnnnnnnnnnnnnnnnnnnnnnnnnnnnnnnnnnnnnnnnnnnnnnnnnnnnnnnnnnnnnnnnnnnnnnnnnnnnnnnnnnnnnnnnnnnnnnnnnnnnnnnnnnnnnnnnnnnnnnnnnnnnnnnnnnnnnnnnnnnnnnnnnnnnnnnnnnnnnnnnnnnnnnnnnnnnnnnnnnnnnnnnnnnnnnnnnnnnnnnnnnnnnnnnnnnnnnnnnnnnnnnnnnnnnnnnnnnnnnnnnnnnnnnnnnnnnnnnnnnnnnnnnnnnnnnnnnnnnnnnnnnnnnnnnnnnnnnnnnnnnnnnnnnnnnnnnnnnnnnnnnnnnnnnnnnnnnnnnnnnnnnnnnnnnnnnnnnnnnnnnnnnnnnnnnnnnnnnnnnnnnnnnnnnnnnnnnnnnnnnnnnnnnnnnnnnnnnnnnnnnnnnnnnnnnnnnnnnnnnnnnnnnnnnnnnnnnnnnnnnnnnnnnnnnnnnnnnnnnnnnnnnnnnnnnnnnnnnnnnnnnnnnnnnnnnnnnnnnnnnnnnnnnnnnnnnnnnnnnnnnnnnnnnnnnnnnnnnnnnnnnnnnnnnnnnnnnnnnnnnnnnnnnnnnnnnnnnnnnnnnnnnnnnnnnnnnnnnnnnnnnnnnnnnnnnnnnnnnnnnnnnnnnnnnnnnnnnnnnnnnnnnnnnnnnnnnnnnnnnnnnnnnnnnnnnnnnnnnnnnnnnnnnnnnnnnnnnnnnnnnnnnnnnnnnnnnnnnnnnnnnnnnnnnnnnnnnnnnnnnnnnnnnnnnnnnnnnnnnnnnnnnnnnnnnnnnnnnnnnnnnnnnnnnnnnnnnnnnnnnnnnnnnnnnnnnnnnnnnnnnnnnnnnnnnnnnnnnnnnnnnnnnnnnnnnnnnnnnnnnnnnnnnnnnnnnnnnnnnnnnnnnnnnnnnnnnnnnnnnnnnnnnnnnnnnnnnnnnnnnnnnnnnnnnnnnnnnnnnnnnnnnnnnnnnnnnnnnnnnnnnnnnnnnnnnnnnnnnnnnnnnnnnnnnnnnnnnnnnnnnnnnnnnnnnnnnnnnnnnnnnnnnnnnnnnnnnnnnnnnnnnnnnnnnnnnnnnnnnnnnnnnnnnnnnnnnnnnnnnnnnnnnnnnnnnnnnnnnnnnnnnnnnnnnnnnnnnnnnnnnnnnnnnnnnnnnnnnnnnnnnnnnnnnnnnnnnnnnnnnnnnnnnnnnnnnnnnnnnnnnnnnnnnnnnnnnnnnnnnnnnnnnnnnnnnnnnnnnnnnnnnnnnnnnnnnnnnnnnnnnnnnnnnnnnnnnnnnnnnnnnnnnnnnnnnnnnnnnnnnnnnnnnnnnnnnnnnnnnnnnnnnnnnnnnnnnnnnnnnnnnnnnnnnnnnnnnnnnnnnnnnnnnnnnnnnnnnnnnnnnnnnnnnnnnnnnnnnnnnnnnnnnnnnnnnnnnnnnnnnnnnnnnnnnnnnnnnnnnnnnnnnnnnnnnnnnnnnnnnnnnnnnnnnnnnnnnnnnnnnnnnnnnnnnnnnnnnnnnnnnnnnnnnnnnnnnnnnnnnnnnnnnnnnnnnnnnnnnnnnnnnnnnnnnnnnnnnnnnnnnnnnnnnnnnnnnnnnnnnnnnnnnnnnnnnnnnnnnnnnnnnnnnnnnnnnnnnnnnnnnnnnnnnnnnnnnnnnnnnnnnnnnnnnnnnnnnnnnnnnnnnnnnnnnnnnnnnnnnnnnnnnnnnnnnnnnnnnnnnnnnnnnnnnnnnnnnnnnnnnnnnnnnnnnnnnnnnnnnnnnnnnnnnnnnnnnnnnnnnnnnnnnnnnnnnnnnnnnnnnnnnnnnnnnnnnnnnnnnnnnnnnnnnnnnnnnnnnnnnnnnnnnnnnnnnnnnnnnnnnnnnnnnnnnnnnnnnnnnnnnnnnnnnnnnnnnnnnnnnnnnnnnnnnnnnnnnnnnnnnnnnnnnnnnnnnnnnnnnnnnnnnnnnnnnnnnnnnnnnnnnnnnnnnnnnnnnnnnnnnnnnnnnnnnnnnnnnnnnnnnnnnnnnnnnnnnnnnnnnnnnnnnnnnnnnnnnnnnnnnnnnnnnnnnnnnnnnnnnnnnnnnnnnnnnnnnnnnnnnnnnnnnnnnnnnnnnnnnnnnnnnnnnnnnnnnnnnnnnnnnnnnnnnnnnnnnnnnnnnnnnnnnnnnnnnnnnnnnnnnnnnnnnnnnnnnnnnnnnnnnnnnnnnnnnnnnnnnnnnnnnnnnnnnnnnnnnnnnnnnnnnnnnnnnnnnnnnnnnnnnnnnnnnnnnnnnnnnnnnnnnnnnnnnnnnnnnnnnnnnnnnnnnnnnnnnnnnnnnnnnnnnnnnnnnnnnnnnnnnnnnnnnnnnnnnnnnnnnnnnnnnnnnnnnnnnnnnnnnnnnnnnnnnnnnnnnnnnnnnnnnnnnnnnnnnnnnnnnnnnnnnnnnnnnnnnnnnnnnnnnnnnnnnnnnnnnnnnnnnnnnnnnnnnnnnnnnnnnnnnnnnnnnnnnnnnnnnnnnnnnnnnnnnnnnnnnnnnnnnnnnnnnnnnnnnnnnnnnnnnnnnnnnnnnnnnnnnnnnnnnnnnnnnnnnnnnnnnnnnnnnnnnnnnnnnnnnnnnnnnnnnnnnnnnnnnnnnnnnnnnnnnnnnnnnnnnnnnnnnnnnnnnnnnnnnnnnnnnnnnnnnnnnnnnnnnnnnnnnnnnnnnnnnnnnnnnnnnnnnnnnnnnnnnnnnnnnnnnnnnnnnnnnnnnnnnnnnnnnnnnnnnnnnnnnnnnnnnnnnnnnnnnnnnnnnnnnnnnnnnnnnnnnnnnnnnnnnnnnnnnnnnnnnnnnnnnnnnnnnnnnnnnnnnnnnnnnnnnnnnnnnnnnnnnnnnnnnnnnnnnnnnnnnnnnnnnnnnnnnnnnnnnnnnnnnnnnnnnnnnnnnnnnnnnnnnnnnnnnnnnnnnnnnnnnnnnnnnnnnnnnnnnnnnnnnnnnnnnnnnnnnnnnnnnnnnnnnnnnnnnnnnnnnnnnnnnnnnnnnnnnnnnnnnnnnnnnnnnnnnnnnnnnnnnnnnnnnnnnnnnnnnnnnnnnnnnnnnnnnnnnnnnnnnnnnnnnnnnnnnnnnnnnnnnnnnnnnnnnnnnnnnnnnnnnnnnnnnnnnnnnnnnnnnnnnnnnnnnnnnnnnnnnnnnnnnnnnnnnnnnnnnnnnnnnnnnnnnnnnnnnnnnnnnnnnnnnnnnnnnnnnnnnnnnnnnnnnnnnnnnnnnnnnnnnnnnnnnnnnnnnnnnnnnnnnnnnnnnnnnnnnnnnnnnnnnnnnnnnnnnnnnnnnnnnnnnnnnnnnnnnnnnnnnnnnnnnnnnnnnnnnnnnnnnnnnnnnnnnnnnnnnnnnnnnnnnnnnnnnnnnnnnnnnnnnnnnnnnnnnnnnnnnnnnnnnnnnnnnnnnnnnnnnnnnnnnnnnnnnnnnnnnnnnnnnnnnnnnnnnnnnnnnnnnnnnnnnnnnnnnnnnnnnnnnnnnnnnnnnnnnnnnnnnnnnnnnnnnnnnnnnnnnnnnnnnnnnnnnnnnnnnnnnnnnnnnnnnnnnnnnnnnnnnnnnnnnnnnnnnnnnnnnnnnnnnnnnnnnnnnnnnnnnnnnnnnnnnnnnnnnnnnnnnnnnnnnnnnnnnnnnnnnnnnnnnnnnnnnnnnnnnnnnnnnnnnnnnnnnnnnnnnnnnnnnnnnnnnnnnnnnnnnnnnnnnnnnnnnnnnnnnnnnnnnnnnnnnnnnnnnnnnnnnnnnnnnnnnnnnnnnnnnnnnnnnnnnnnnnnnnnnnnnnnnnnnnnnnnnnnnnnnnnnnnnnnnnnnnnnnnnnnnnnnnnnnnnnnnnnnnnnnnnnnnnnnnnnnnnnnnnnnnnnnnnnnnnnnnnnnnnnnnnnnnnnnnnnnnnnnnnnnnnnnnnnnnnnnnnnnnnnnnnnnnnnnnnnnnnnnnnnnnnnnnnnnnnnnnnnnnnnnnnnnnnnnnnnnnnnnnnnnnnnnnnnnnnnnnnnnnnnnnnnnnnnnnnnnnnnnnnnnnnnnnnnnnnnnnnnnnnnnnnnnnnnnnnnnnnnnnnnnnnnnnnnnnnnnnnnnnnnnnnnnnnnnnnnnnnnnnnnnnnnnnnnnnnnnnnnnnnnnnnnnnnnnnnnnnnnnnnnnnnnnnnnnnnnnnnnnnnnnnnnnnnnnnnnnnnnnnnnnnnnnnnnnnnnnnnnnnnnnnnnnnnnnnnnnnnnnnnnnnnnnnnnnnnnnnnnnnnnnnnnnnnnnnnnnnnnnnnnnnnnnnnnnnnnnnnnnnnnnnnnnnnnnnnnnnnnnnnnnnnnnnnnnnnnnnnnnnnnnnnnnnnnnnnnnnnnnnnnnnnnnnnnnnnnnnnnnnnnnnnnnnnnnnnnnnnnnnnnnnnnnnnnnnnnnnnnnnnnnnnnnnnnnnnnnnnnnnnnnnnnnnnnnnnnnnnnnnnnnnnnnnnnnnnnnnnnnnnnnnnnnnnnnnnnnnnnnnnnnnnnnnnnnnnnnnnnnnnnnnnnnnnnnnnnnnnnnnnnnnnnnnnnnnnnnnnnnnnnnnnnnnnnnnnnnnnnnnnnnnnnnnnnnnnnnnnnnnnnnnnnnnnnnnnnnnnnnnnnnnnnnnnnnnnnnnnnnnnnnnnnnnnnnnnnnnnnnnnnnnnnnnnnnnnnnnnnnnnnnnnnnnnnnnnnnnnnnnnnnnnnnnnnnnnnnnnnnnnnnnnnnnnnnnnnnnnnnnnnnnnnnnnnnnnnnnnnnnnnnnnnnnnnnnnnnnnnnnnnnnnnnnnnnnnnnnnnnnnnnnnnnnnnnnnnnnnnnnnnnnnnnnnnnnnnnnnnnnnnnnnnnnnnnnnnnnnnnnnnnnnnnnnnnnnnnnnnnnnnnnnnnnnnnnnnnnnnnnnnnnnnnnnnnnnnnnnnnnnnnnnnnnnnnnnnnnnnnnnnnnnnnnnnnnnnnnnnnnnnnnnnnnnnnnnnnnnnnnnnnnnnnnnnnnnnnnnnnnnnnnnnnnnnnnnnnnnnnnnnnnnnnnnnnnnnnnnnnnnnnnnnnnnnnnnnnnnnnnnnnnnnnnnnnnnnnnnnnnnnnnnnnnnnnnnnnnnnnnnnnnnnnnnnnnnnnnnnnnnnnnnnnnnnnnnnnnnnnnnnnnnnnnnnnnnnnnnnnnnnnnnnnnnnnnnnnnnnnnnnnnnnnnnnnnnnnnnnnnnnnnnnnnnnnnnnnnnnnnnnnnnnnnnnnnnnnnnnnnnnnnnnnnnnnnnnnnnnnnnnnnnnnnnnnnnnnnnnnnnnnnnnnnnnnnnnnnnnnnnnnnnnnnnnnnnnnnnnnnnnnnnnnnnnnnnnnnnnnnnnnnnnnnnnnnnnnnnnnnnnnnnnnnnnnnnnnnnnnnnnnnnnnnnnnnnnnnnnnnnnnnnnnnnnnnnnnnnnnnnnnnnnnnnnnnnnnnnnnnnnnnnnnnnnnnnnnnnnnnnnnnnnnnnnnnnnnnnnnnnnnnnnnnnnnnnnnnnnnnnnnnnnnnnnnnnnnnnnnnnnnnnnnnnnnnnnnnnnnnnnnnnnnnnnnnnnnnnnnnnnnnnnnnnnnnnnnnnnnnnnnnnnnnnnnnnnnnnnnnnnnnnnnnnnnnnnnnnnnnnnnnnnnnnnnnnnnnnnnnnnnnnnnnnnnnnnnnnnnnnnnnnnnnnnnnnnnnnnnnnnnnnnnnnnnnnnnnnnnnnnnnnnnnnnnnnnnnnnnnnnnnnnnnnnnnnnnnnnnnnnnnnnnnnnnnnnnnnnnnnnnnnnnnnnnnnnnnnnnnnnnnnnnnnnnnnnnnnnnnnnnnnnnnnnnnnnnnnnnnnnnnnnnnnnnnnnnnnnnnnnnnnnnnnnnnnnnnnnnnnnnnnnnnnnnnnnnnnnnnnnnnnnnnnnnnnnnnnnnnnnnnnnnnnnnnnnnnnnnnnnnnnnnnnnnnnnnnnnnnnnnnnnnnnnnnnnnnnnnnnnnnnnnnnnnnnnnnnnnnnnnnnnnnnnnnnnnnnnnnnnnnnnnnnnnnnnnnnnnnnnnnnnnnnnnnnnnnnnnnnnnnnnnnnnnnnnnnnnnnnnnnnnnnnnnnnnnnnnnnnnnnnnnnnnnnnnnnnnnnnnnnnnnnnnnnnnnnnnnnnnnnnnnnnnnnnnnnnnnnnnnnnnnnnnnnnnnnnnnnnnnnnnnnnnnnnnnnnnnnnnnnnnnnnnnnnnnnnnnnnnnnnnnnnnnnnnnnnnnnnnnnnnnnnnnnnnnnnnnnnnnnnnnnnnnnnnnnnnnnnnnnnnnnnnnnnnnnnnnnnnnnnnnnnnnnnnnnnnnnnnnnnnnnnnnnnnnnnnnnnnnnnnnnnnnnnnnnnnnnnnnnnnnnnnnnnnnnnnnnnnnnnnnnnnnnnnnnnnnnnnnnnnnnnnnnnnnnnnnnnnnnnnnnnnnnnnnnnnnnnnnnnnnnnnnnnnnnnnnnnnnnnnnnnnnnnnnnnnnnnnnnnnnnnnnnnnnnnnnnnnnnnnnnnnnnnnnnnnnnnnnnnnnnnnnnnnnnnnnnnnnnnnnnnnnnnnnnnnnnnnnnnnnnnnnnnnnnnnnnnnnnnnnnnnnnnnnnnnnnnnnnnnnnnnnnnnnnnnnnnnnnnnnnnnnnnnnnnnnnnnnnnnnnnnnnnnnnnnnnnnnnnnnnnnnnnnnnnnnnnnnnnnnnnnnnnnnnnnnnnnnnnnnnnnnnnnnnnnnnnnnnnnnnnnnnnnnnnnnnnnnnnnnnnnnnnnnnnnnnnnnnnnnnnnnnnnnnnnnnnnnnnnnnnnnnnnnnnnnnnnnnnnnnnnnnnnnnnnnnnnnnnnnnnnnnnnnnnnnnnnnnnnnnnnnnnnnnnnnnnnnnnnnnnnnnnnnnnnnnnnnnnnnnnnnnnnnnnnnnnnnnnnnnnnnnnnnnnnnnnnnnnnnnnnnnnnnnnnnnnnnnnnnnnnnnnnnnnnnnnnnnnnnnnnnnnnnnnnnnnnnnnnnnnnnnnnnnnnnnnnnnnnnnnnnnnnnnnnnnnnnnnnnnnnnnnnnnnnnnnnnnnnnnnnnnnnnnnnnnnnnnnnnnnnnnnnnnnnnnnnnnnnnnnnnnnnnnnnnnnnnnnnnnnnnnnnnnnnnnnnnnnnnnnnnnnnnnnnnnnnnnnnnnnnnnnnnnnnnnnnnnnnnnnnnnnnnnnnnnnnnnnnnnnnnnnnnnnnnnnnnnnnnnnnnnnnnnnnnnnnnnnnnnnnnnnnnnnnnnnnnnnnnnnnnnnnnnnnnnnnnnnnnnnnnnnnnnnnnnnnnnnnnnnnnnnnnnnnnnnnnnnnnnnnnnnnnnnnnnnnnnnnnnnnnnnnnnnnnnnnnnnnnnnnnnnnnnnnnnnnnnnnnnnnnnnnnnnnnnnnnnnnnnnnnnnnnnnnnnnnnnnnnnnnnnnnnnnnnnnnnnnnnnnnnnnnnnnnnnnnnnnnnnnnnnnnnnnnnnnnnnnnnnnnnnnnnnnnnnnnnnnnnnnnnnnnnnnnnnnnnnnnnnnnnnnnnnnnnnnnnnnnnnnnnnnnnnnnnnnnnnnnnnnnnnnnnnnnnnnnnnnnnnnnnnnnnnnnnnnnnnnnnnnnnnnnnnnnnnnnnnnnnnnnnnnnnnnnnnnnnnnnnnnnnnnnnnnnnnnnnnnnnnnnnnnnnnnnnnnnnnnnnnnnnnnnnnnnnnnnnnnnnnnnnnnnnnnnnnnnnnnnnnnnnnnnnnnnnnnnnnnnnnnnnnnnnnnnnnnnnnnnnnnnnnnnnnnnnnnnnnnnnnnnnnnnnnnnnnnnnnnnnnnnnnnnnnnnnnnnnnnnnnnnnnnnnnnnnnnnnnnnnnnnnnnnnnnnnnnnnnnnnnnnnnnnnnnnnnnnnnnnnnnnnnnnnnnnnnnnnnnnnnnnnnnnnnnnnnnnnnnnnnnnnnnnnnnnnnnnnnnnnnnnnnnnnnnnnnnnnnnnnnnnnnnnnnnnnnnnnnnnnnnnnnnnnnnnnnnnnnnnnnnnnnnnnnnnnnnnnnnnnnnnnnnnnnnnnnnnnnnnnnnnnnnnnnnnnnnnnnnnnnnnnnnnnnnnnnnnnnnnnnnnnnnnnnnnnnnnnnnnnnnnnnnnnnnnnnnnnnnnnnnnnnnnnnnnnnnnnnnnnnnnnnnnnnnnnnnnnnnnnnnnnnnnnnnnnnnnnnnnnnnnnnnnnnnnnnnnnnnnnnnnnnnnnnnnnnnnnnnnnnnnnnnnnnnnnnnnnnnnnnnnnnnnnnnnnnnnnnnnnnnnnnnnnnnnnnnnnnnnnnnnnnnnnnnnnnnnnnnnnnnnnnnnnnnnnnnnnnnnnnnnnnnnnnnnnnnnnnnnnnnnnnnnnnnnnnnnnnnnnnnnnnnnnnnnnnnnnnnnnnnnnnnnnnnnnnnnnnnnnnnnnnnnnnnnnnnnnnnnnnnnnnnnnnnnnnnnnnnnnnnnnnnnnnnnnnnnnnnnnnnnnnnnnnnnnnnnnnnnnnnnnnnnnnnnnnnnnnnnnnnnnnnnnnnnnnnnnnnnnnnnnnnnnnnnnnnnnnnnnnnnnnnnnnnnnnnnnnnnnnnnnnnnnnnnnnnnnnnnnnnnnnnnnnnnnnnnnnnnnnnnnnnnnnnnnnnnnnnnnnnnnnnnnnnnnnnnnnnnnnnnnnnnnnnnnnnnnnnnnnnnnnnnnnnnnnnnnnnnnnnnnnnnnnnnnnnnnnnnnnnnnnnnnnnnnnnnnnnnnnnnnnnnnnnnnnnnnnnnnnnnnnnnnnnnnnnnnnnnnnnnnnnnnnnnnnnnnnnnnnnnnnnnnnnnnnnnnnnnnnnnnnnnnnnnnnnnnnnnnnnnnnnnnnnnnnnnnnnnnnnnnnnnnnnnnnnnnnnnnnnnnnnnnnnnnnnnnnnnnnnnnnnnnnnnnnnnnnnnnnnnnnnnnnnnnnnnnnnnnnnnnnnnnnnnnnnnnnnnnnnnnnnnnnnnnnnnnnnnnnnnnnnnnnnnnnnnnnnnnnnnnnnnnnnnnnnnnnnnnnnnnnnnnnnnnnnnnnnnnnnnnnnnnnnnnnnnnnnnnnnnnnnnnnnnnnnnnnnnnnnnnnnnnnnnnnnnnnnnnnnnnnnnnnnnnnnnnnnnnnnnnnnnnnnnnnnnnnnnnnnnnnnnnnnnnnnnnnnnnnnnnnnnnnnnnnnnnnnnnnnnnnnnnnnnnnnnnnnnnnnnnnnnnnnnnnnnnnnnnnnnnnnnnnnnnnnnnnnnnnnnnnnnnnnnnnnnnnnnnnnnnnnnnnnnnnnnnnnnnnnnnnnnnnnnnnnnnnnnnnnnnnnnnnnnnnnnnnnnnnnnnnnnnnnnnnnnnnnnnnnnnnnnnnnnnnnnnnnnnnnnnnnnnnnnnnnnnnnnnnnnnnnnnnnnnnnnnnnnnnnnnnnnnnnnnnnnnnnnnnnnnnnnnnnnnnnnnnnnnnnnnnnnnnnnnnnnnnnnnnnnnnnnnnnnnnnnnnnnnnnnnnnnnnnnnnnnnnnnnnnnnnnnnnnnnnnnnnnnnnnnnnnnnnnnnnnnnnnnnnnnnnnnnnnnnnnnnnnnnnnnnnnnnnnnnnnnnnnnnnnnnnnnnnnnnnnnnnnnnnnnnnnnnnnnnnnnnnnnnnnnnnnnnnnnnnnnnnnnnnnnnnnnnnnnnnnnnnnnnnnnnnnnnnnnnnnnnnnnnnnnnnnnnnnnnnnnnnnnnnnnnnnnnnnnnnnnnnnnnnnnnnnnnnnnnnnnnnnnnnnnnnnnnnnnnnnnnnnnnnnnnnnnnnnnnnnnnnnnnnnnnnnnnnnnnnnnnnnnnnnnnnnnnnnnnnnnnnnnnnnnnnnnnnnnnnnnnnnnnnnnnnnnnnnnnnnnnnnnnnnnnnnnnnnnnnnnnnnnnnnnnnnnnnnnnnnnnnnnnnnnnnnnnnnnnnnnnnnnnnnnnnnnnnnnnnnnnnnnnnnnnnnnnnnnnnnnnnnnnnnnnnnnnnnnnnnnnnnnnnnnnnnnnnnnnnnnnnnnnnnnnnnnnnnnnnnnnnnnnnnnnnnnnnnnnnnnnnnnnnnnnnnnnnnnnnnnnnnnnnnnnnnnnnnnnnnnnnnnnnnnnnnnnnnnnnnnnnnnnnnnnnnnnnnnnnnnnnnnnnnnnnnnnnnnnnnnnnnnnnnnnnnnnnnnnnnnnnnnnnnnnnnnnnnnnnnnnnnnnnnnnnnnnnnnnnnnnnnnnnnnnnnnnnnnnnnnnnnnnnnnnnnnnnnnnnnnnnnnnnnnnnnnnnnnnnnnnnnnnnnnnnnnnnnnnnnnnnnnnnnnnnnnnnnnnnnnnnnnnnnnnnnnnnnnnnnnnnnnnnnnnnnnnnnnnnnnnnnnnnnnnnnnnnnnnnnnnnnnnnnnnnnnnnnnnnnnnnnnnnnnnnnnnnnnnnnnnnnnnnnnnnnnnnnnnnnnnnnnnnnnnnnnnnnnnnnnnnnnnnnnnnnnnnnnnnnnnnnnnnnnnnnnnnnnnnnnnnnnnnnnnnnnnnnnnnnnnnnnnnnnnnnnnnnnnnnnnnnnnnnnnnnnnnnnnnnnnnnnnnnnnnnnnnnnnnnnnnnnnnnnnnnnnnnnnnnnnnnnnnnnnnnnnnnnnnnnnnnnnnnnnnnnnnnnnnnnnnnnnnnnnnnnnnnnnnnnnnnnnnnnnnnnnnnnnnnnnnnnnnnnnnnnnnnnnnnnnnnnnnnnnnnnnnnnnnnnnnnnnnnnnnnnnnnnnnnnnnnnnnnnnnnnnnnnnnnnnnnnnnnnnnnnnnnnnnnnnnnnnnnnnnnnnnnnnnnnnnnnnnnnnnnnnnnnnnnnnnnnnnnnnnnnnnnnnnnnnnnnnnnnnnnnnnnnnnnnnnnnnnnnnnnnnnnnnnnnnnnnnnnnnnnnnnnnnnnnnnnnnnnnnnnnnnnnnnnnnnnnnnnnnnnnnnnnnnnnnnnnnnnnnnnnnnnnnnnnnnnnnnnnnnnnnnnnnnnnnnnnnnnnnnnnnnnnnnnnnnnnnnnnnnnnnnnnnnnnnnnnnnnnnnnnnnnnnnnnnnnnnnnnnnnnnnnnnnnnnnnnnnnnnnnnnnnnnnnnnnnnnnnnnnnnnnnnnnnnnnnnnnnnnnnnnnnnnnnnnnnnnnnnnnnnnnnnnnnnnnnnnnnnnnnnnnnnnnnnnnnnnnnnnnnnnnnnnnnnnnnnnnnnnnnnnnnnnnnnnnnnnnnnnnnnnnnnnnnnnnnnnnnnnnnnnnnnnnnnnnnnnnnnnnnnnnnnnnnnnnnnnnnnnnnnnnnnnnnnnnnnnnnnnnnnnnnnnnnnnnnnnnnnnnnnnnnnnnnnnnnnnnnnnnnnnnnnnnnnnnnnnnnnnnnnnnnnnnnnnnnnnnnnnnnnnnnnnnnnnnnnnnnnnnnnnnnnnnnnnnnnnnnnnnnnnnnnnnnnnnnnnnnnnnnnnnnnnnnnnnnnnnnnnnnnnnnnnnnnnnnnnnnnnnnnnnnnnnnnnnnnnnnnnnnnnnnnnnnnnnnnnnnnnnnnnnnnnnnnnnnnnnnnnnnnnnnnnnnnnnnnnnnnnnnnnnnnnnnnnnnnnnnnnnnnnnnnnnnnnnnnnnnnnnnnnnnnnnnnnnnnnnnnnnnnnnnnnnnnnnnnnnnnnnnnnnnnnnnnnnnnnnnnnnnnnnnnnnnnnnnnnnnnnnnnnnnnnnnnnnnnnnnnnnnnnnnnnnnnnnnnnnnnnnnnnnnnnnnnnnnnnnnnnnnnnnnnnnnnnnnnnnnnnnnnnnnnnnnnnnnnnnnnnnnnnnnnnnnnnnnnnnnnnnnnnnnnnnnnnnnnnnnnnnnnnnnnnnnnnnnnnnnnnnnnnnnnnnnnnnnnnnnnnnnnnnnnnnnnnnnnnnnnnnnnnnnnnnnnnnnnnnnnnnnnnnnnnnnnnnnnnnnnnnnnnnnnnnnnnnnnnnnnnnnnnnnnnnnnnnnnnnnnnnnnnnnnnnnnnnnnnnnnnnnnnnnnnnnnnnnnnnnnnnnnnnnnnnnnnnnnnnnnnnnnnnnnnnnnnnnnnnnnnnnnnnnnnnnnnnnnnnnnnnnnnnnnnnnnnnnnnnnnnnnnnnnnnnnnnnnnnnnnnnnnnnnnnnnnnnnnnnnnnnnnnnnnnnnnnnnnnnnnnnnnnnnnnnnnnnnnnnnnnnnnnnnnnnnnnnnnnnnnnnnnnnnnnnnnnnnnnnnnnnnnnnnnnnnnnnnnnnnnnnnnnnnnnnnnnnnnnnnnnnnnnnnnnnnnnnnnnnnnnnnnnnnnnnnnnnnnnnnnnnnnnnnnnnnnnnnnnnnnnnnnnnnnnnnnnnnnnnnnnnnnnnnnnnnnnnnnnnnnnnnnnnnnnnnnnnnnnnnnnnnnnnnnnnnnnnnnnnnnnnnnnnnnnnnnnnnnnnnnnnnnnnnnnnnnnnnnnnnnnnnnnnnnnnnnnnnnnnnnnnnnnnnnnnnnnnnnnnnnnnnnnnnnnnnnnnnnnnnnnnnnnnnnnnnnnnnnnnnnnnnnnnnnnnnnnnnnnnnnnnnnnnnnnnnnnnnnnnnnnnnnnnnnnnnnnnnnnnnnnnnnnnnnnnnnnnnnnnnnnnnnnnnnnnnnnnnnnnnnnnnnnnnnnnnnnnnnnnnnnnnnnnnnnnnnnnnnnnnnnnnnnnnnnnnnnnnnnnnnnnnnnnnnnnnnnnnnnnnnnnnnnnnnnnnnnnnnnnnnnnnnnnnnnnnnnnnnnnnnnnnnnnnnnnnnnnnnnnnnnnnnnnnnnnnnnnnnnnnnnnnnnnnnnnnnnnnnnnnnnnnnnnnnnnnnnnnnnnnnnnnnnnnnnnnnnnnnnnnnnnnnnnnnnnnnnnnnnnnnnnnnnnnnnnnnnnnnnnnnnnnnnnnnnnnnnnnnnnnnnnnnnnnnnnnnnnnnnnnnnnnnnnnnnnnnnnnnnnnnnnnnnnnnnnnnnnnnnnnnnnnnnnnnnnnnnnnnnnnnnnnnnnnnnnnnnnnnnnnnnnnnnnnnnnnnnnnnnnnnnnnnnnnnnnnnnnnnnnnnnnnnnnnnnnnnnnnnnnnnnnnnnnnnnnnnnnnnnnnnnnnnnnnnnnnnnnnnnnnnnnnnnnnnnnnnnnnnnnnnnnnnnnnnnnnnnnnnnnnnnnnnnnnnnnnnnnnnnnnnnnnnnnnnnnnnnnnnnnnnnnnnnnnnnnnnnnnnnnnnnnnnnnnnnnnnnnnnnnnnnnnnnnnnnnnnnnnnnnnnnnnnnnnnnnnnnnnnnnnnnnnnnnnnnnnnnnnnnnnnnnnnnnnnnnnnnnnnnnnnnnnnnnnnnnnnnnnnnnnnnnnnnnnnnnnnnnnnnnnnnnnnnnnnnnnnnnnnnnnnnnnnnnnnnnnnnnnnnnnnnnnnnnnnnnnnnnnnnnnnnnnnnnnnnnnnnnnnnnnnnnnnnnnnnnnnnnnnnnnnnnnnnnnnnnnnnnnnnnnnnnnnnnnnnnnnnnnnnnnnnnnnnnnnnnnnnnnnnnnnnnnnnnnnnnnnnnnnnnnnnnnnnnnnnnnnnnnnnnnnnnnnnnnnnnnnnnnnnnnnnnnnnnnnnnnnnnnnnnnnnnnnnnnnnnnnnnnnnnnnnnnnnnnnnnnnnnnnnnnnnnnnnnnnnnnnnnnnnnnnnnnnnnnnnnnnnnnnnnnnnnnnnnnnnnnnnnnnnnnnnnnnnnnnnnnnnnnnnnnnnnnnnnnnnnnnnnnnnnnnnnnnnnnnnnnnnnnnnnnnnnnnnnnnnnnnnnnnnnnnnnnnnnnnnnnnnnnnnnnnnnnnnnnnnnnnnnnnnnnnnnnnnnnnnnnnnnnnnnnnnnnnnnnnnnnnnnnnnnnnnnnnnnnnnnnnnnnnnnnnnnnnnnnnnnnnnnnnnnnnnnnnnnnnnnnnnnnnnnnnnnnnnnnnnnnnnnnnnnnnnnnnnnnnnnnnnnnnnnnnnnnnnnnnnnnnnnnnnnnnnnnnnnnnnnnnnnnnnnnnnnnnnnnnnnnnnnnnnnnnnnnnnnnnnnnnnnnnnnnnnnnnnnnnnnnnnnnnnnnnnnnnnnnnnnnnnnnnnnnnnnnnnnnnnnnnnnnnnnnnnnnnnnnnnnnnnnnnnnnnnnnnnnnnnnnnnnnnnnnnnnnnnnnnnnnnnnnnnnnnnnnnnnnnnnnnnnnnnnnnnnnnnnnnnnnnnnnnnnnnnnnnnnnnnnnnnnnnnnnnnnnnnnnnnnnnnnnnnnnnnnnnnnnnnnnnnnnnnnnnnnnnnnnnnnnnnnnnnnnnnnnnnnnnnnnnnnnnnnnnnnnnnnnnnnnnnnnnnnnnnnnnnnnnnnnnnnnnnnnnnnnnnnnnnnnnnnnnnnnnnnnnnnnnnnnnnnnnnnnnnnnnnnnnnnnnnnnnnnnnnnnnnnnnnnnnnnnnnnnnnnnnnnnnnnnnnnnnnnnnnnnnnnnnnnnnnnnnnnnnnnnnnnnnnnnnnnnnnnnnnnnnnnnnnnnnnnnnnnnnnnnnnnnnnnnnnnnnnnnnnnnnnnnnnnnnnnnnnnnnnnnnnnnnnnnnnnnnnnnnnnnnnnnnnnnnnnnnnnnnnnnnnnnnnnnnnnnnnnnnnnnnnnnnnnnnnnnnnnnnnnnnnnnnnnnnnnnnnnnnnnnnnnnnnnnnnnnnnnnnnnnnnnnnnnnnnnnnnnnnnnnnnnnnnnnnnnnnnnnnnnnnnnnnnnnnnnnnnnnnnnnnnnnnnnnnnnnnnnnnnnnnnnnnnnnnnnnnnnnnnnnnnnnnnnnnnnnnnnnnnnnnnnnnnnnnnnnnnnnnnnnnnnnnnnnnnnnnnnnnnnnnnnnnnnnnnnnnnnnnnnnnnnnnnnnnnnnnnnnnnnnnnnnnnnnnnnnnnnnnnnnnnnnnnnnnnnnnnnnnnnnnnnnnnnnnnnnnnnnnnnnnnnnnnnnnnnnnnnnnnnnnnnnnnnnnnnnnnnnnnnnnnnnnnnnnnnnnnnnnnnnnnnnnnnnnnnnnnnnnnnnnnnnnnnnnnnnnnnnnnnnnnnnnnnnnnnnnnnnnnnnnnnnnnnnnnnnnnnnnnnnnnnnnnnnnnnnnnnnnnnnnnnnnnnnnnnnnnnnnnnnnnnnnnnnnnnnnnnnnnnnnnnnnnnnnnnnnnnnnnnnnnnnnnnnnnnnnnnnnnnnnnnnnnnnnnnnnnnnnnnnnnnnnnnnnnnnnnnnnnnnnnnnnnnnnnnnnnnnnnnnnnnnnnnnnnnnnnnnnnnnnnnnnnnnnnnnnnnnnnnnnnnnnnnnnnnnnnnnnnnnnnnnnnnnnnnnnnnnnnnnnnnnnnnnnnnnnnnnnnnnnnnnnnnnnnnnnnnnnnnnnnnnnnnnnnnnnnnnnnnnnnnnnnnnnnnnnnnnnnnnnnnnnnnnnnnnnnnnnnnnnnnnnnnnnnnnnnnnnnnnnnnnnnnnnnnnnnnnnnnnnnnnnnnnnnnnnnnnnnnnnnnnnnnnnnnnnnnnnnnnnnnnnnnnnnnnnnnnnnnnnnnnnnnnnnnnnnnnnnnnnnnnnnnnnnnnnnnnnnnnnnnnnnnnnnnnnnnnnnnnnnnnnnnnnnnnnnnnnnnnnnnnnnnnnnnnnnnnnnnnnnnnnnnnnnnnnnnnnnnnnnnnnnnnnnnnnnnnnnnnnnnnnnnnnnnnnnnnnnnnnnnnnnnnnnnnnnnnnnnnnnnnnnnnnnnnnnnnnnnnnnnnnnnnnnnnnnnnnnnnnnnnnnnnnnnnnnnnnnnnnnnnnnnnnnnnnnnnnnnnnnnnnnnnnnnnnnnnnnnnnnnnnnnnnnnnnnnnnnnnnnnnnnnnnnnnnnnnnnnnnnnnnnnnnnnnnnnnnnnnnnnnnnnnnnnnnnnnnnnnnnnnnnnnnnnnnnnnnnnnnnnnnnnnnnnnnnnnnnnnnnnnnnnnnnnnnnnnnnnnnnnnnnnnnnnnnnnnnnnnnnnnnnnnnnnnnnnnnnnnnnnnnnnnnnnnnnnnnnnnnnnnnnnnnnnnnnnnnnnnnnnnnnnnnnnnnnnnnnnnnnnnnnnnnnnnnnnnnnnnnnnnnnnnnnnnnnnnnnnnnnnnnnnnnnnnnnnnnnnnnnnnnnnnnnnnnnnnnnnnnnnnnnnnnnnnnnnnnnnnnnnnnnnnnnnnnnnnnnnnnnnnnnnnnnnnnnnnnnnnnnnnnnnnnnnnnnnnnnnnnnnnnnnnnnnnnnnnnnnnnnnnnnnnnnnnnnnnnnnnnnnnnnnnnnnnnnnnnnnnnnnnnnnnnnnnnnnnnnnnnnnnnnnnnnnnnnnnnnnnnnnnnnnnnnnnnnnnnnnnnnnnnnnnnnnnnnnnnnnnnnnnnnnnnnnnnnnnnnnnnnnnnnnnnnnnnnnnnnnnnnnnnnnnnnnnnnnnnnnnnnnnnnnnnnnnnnnnnnnnnnnnnnnnnnnnnnnnnnnnnnnnnnnnnnnnnnnnnnnnnnnnnnnnnnnnnnnnnnnnnnnnnnnnnnnnnnnnnnnnnnnnnnnnnnnnnnnnnnnnnnnnnnnnnnnnnnnnnnnnnnnnnnnnnnnnnnnnnnnnnnnnnnnnnnnnnnnnnnnnnnnnnnnnnnnnnnnnnnnnnnnnnnnnnnnnnnnnnnnnnnnnnnnnnnnnnnnnnnnnnnnnnnnnnnnnnnnnnnnnnnnnnnnnnnnnnnnnnnnnnnnnnnnnnnnnnnnnnnnnnnnnnnnnnnnnnnnnnnnnnnnnnnnnnnnnnnnnnnnnnnnnnnnnnnnnnnnnnnnnnnnnnnnnnnnnnnnnnnnnnnnnnnnnnnnnnnnnnnnnnnnnnnnnnnnnnnnnnnnnnnnnnnnnnnnnnnnnnnnnnnnnnnnnnnnnnnnnnnnnnnnnnnnnnnnnnnnnnnnnnnnnnnnnnnnnnnnnnnnnnnnnnnnnnnnnnnnnnnnnnnnnnnnnnnnnnnnnnnnnnnnnnnnnnnnnnnnnnnnnnnnnnnnnnnnnnnnnnnnnnnnnnnnnnnnnnnnnnnnnnnnnnnnnnnnnnnnnnnnnnnnnnnnnnnnnnnnnnnnnnnnnnnnnnnnnnnnnnnnnnnnnnnnnnnnnnnnnnnnnnnnnnnnnnnnnnnnnnnnnnnnnnnnnnnnnnnnnnnnnnnnnnnnnnnnnnnnnnnnnnnnnnnnnnnnnnnnnnnnnnnnnnnnnnnnnnnnnnnnnnnnnnnnnnnnnnnnnnnnnnnnnnnnnnnnnnnnnnnnnnnnnnnnnnnnnnnnnnnnnnnnnnnnnnnnnnnnnnnnnnnnnnnnnnnnnnnnnnnnnnnnnnnnnnnnnnnnnnnnnnnnnnnnnnnnnnnnnnnnnnnnnnnnnnnnnnnnnnnnnnnnnnnnnnnnnnnnnnnnnnnnnnnnnnnnnnnnnnnnnnnnnnnnnnnnnnnnnnnnnnnnnnnnnnnnnnnnnnnnnnnnnnnnnnnnnnnnnnnnnnnnnnnnnnnnnnnnnnnnnnnnnnnnnnnnnnnnnnnnnnnnnnnnnnnnnnnnnnnnnnnnnnnnnnnnnnnnnnnnnnnnnnnnnnnnnnnnnnnnnnnnnnnnnnnnnnnnnnnnnnnnnnnnnnnnnnnnnnnnnnnnnnnnnnnnnnnnnnnnnnnnnnnnnnnnnnnnnnnnnnnnnnnnnnnnnnnnnnnnnnnnnnnnnnnnnnnnnnnnnnnnnnnnnnnnnnnnnnnnnnnnnnnnnnnnnnnnnnnnnnnnnnnnnnnnnnnnnnnnnnnnnnnnnnnnnnnnnnnnnnnnnnnnnnnnnnnnnnnnnnnnnnnnnnnnnnnnnnnnnnnnnnnnnnnnnnnnnnnnnnnnnnnnnnnnnnnnnnnnnnnnnnnnnnnnnnnnnnnnnnnnnnnnnnnnnnnnnnnnnnnnnnnnnnnnnnnnnnnnnnnnnnnnnnnnnnnnnnnnnnnnnnnnnnnnnnnnnnnnnnnnnnnnnnnnnnnnnnnnnnnnnnnnnnnnnnnnnnnnnnnnnnnnnnnnnnnnnnnnnnnnnnnnnnnnnnnnnnnnnnnnnnnnnnnnnnnnnnnnnnnnnnnnnnnnnnnnnnnnnnnnnnnnnnnnnnnnnnnnnnnnnnnnnnnnnnnnnnnnnnnnnnnnnnnnnnnnnnnnnnnnnnnnnnnnnnnnnnnnnnnnnnnnnnnnnnnnnnnnnnnnnnnnnnnnnnnnnnnnnnnnnnnnnnnnnnnnnnnnnnnnnnnnnnnnnnnnnnnnnnnnnnnnnnnnnnnnnnnnnnnnnnnnnnnnnnnnnnnnnnnnnnnnnnnnnnnnnnnnnnnnnnnnnnnnnnnnnnnnnnnnnnnnnnnnnnnnnnnnnnnnnnnnnnnnnnnnnnnnnnnnnnnnnnnnnnnnnnnnnnnnnnnnnnnnnnnnnnnnnnnnnnnnnnnnnnnnnnnnnnnnnnnnnnnnnnnnnnnnnnnnnnnnnnnnnnnnnnnnnnnnnnnnnnnnnnnnnnnnnnnnnnnnnnnnnnnnnnnnnnnnnnnnnnnnnnnnnnnnnnnnnnnnnnnnnnnnnnnnnnnnnnnnnnnnnnnnnnnnnnnnnnnnnnnnnnnnnnnnnnnnnnnnnnnnnnnnnnnnnnnnnnnnnnnnnnnnnnnnnnnnnnnnnnnnnnnnnnnnnnnnnnnnnnnnnnnnnnnnnnnnnnnnnnnnnnnnnnnnnnnnnnnnnnnnnnnnnnnnnnnnnnnnnnnnnnnnnnnnnnnnnnnnnnnnnnnnnnnnnnnnnnnnnnnnnnnnnnnnnnnnnnnnnnnnnnnnnnnnnnnnnnnnnnnnnnnnnnnnnnnnnnnnnnnnnnnnnnnnnnnnnnnnnnnnnnnnnnnnnnnnnnnnnnnnnnnnnnnnnnnnnnnnnnnnnnnnnnnnnnnnnnnnnnnnnnnnnnnnnnnnnnnnnnnnnnnnnnnnnnnnnnnnnnnnnnnnnnnnnnnnnnnnnnnnnnnnnnnnnnnnnnnnnnnnnnnnnnnnnnnnnnnnnnnnnnnnnnnnnnnnnnnnnnnnnnnnnnnnnnnnnnnnnnnnnnnnnnnnnnnnnnnnnnnnnnnnnnnnnnnnnnnnnnnnnnnnnnnnnnnnnnnnnnnnnnnnnnnnnnnnnnnnnnnnnnnnnnnnnnnnnnnnnnnnnnnnnnnnnnnnnnnnnnnnnnnnnnnnnnnnnnnnnnnnnnnnnnnnnnnnnnnnnnnnnnnnnnnnnnnnnnnnnnnnnnnnnnnnnnnnnnnnnnnnnnnnnnnnnnnnnnnnnnnnnnnnnnnnnnnnnnnnnnnnnnnnnnnnnnnnnnnnnnnnnnnnnnnnnnnnnnnnnnnnnnnnnnnnnnnnnnnnnnnnnnnnnnnnnnnnnnnnnnnnnnnnnnnnnnnnnnnnnnnnnnnnnnnnnnnnnnnnnnnnnnnnnnnnnnnnnnnnnnnnnnnnnnnnnnnnnnnnnnnnnnnnnnnnnnnnnnnnnnnnnnnnnnnnnnnnnnnnnnnnnnnnnnnnnnnnnnnnnnnnnnnnnnnnnnnnnnnnnnnnnnnnnnnnnnnnnnnnnnnnnnnnnnnnnnnnnnnnnnnnnnnnnnnnnnnnnnnnnnnnnnnnnnnnnnnnnnnnnnnnnnnnnnnnnnnnnnnnnnnnnnnnnnnnnnnnnnnnnnnnnnnnnnnnnnnnnnnnnnnnnnnnnnnnnnnnnnnnnnnnnnnnnnnnnnnnnnnnnnnnnnnnnnnnnnnnnnnnnnnnnnnnnnnnnnnnnnnnnnnnnnnnnnnnnnnnnnnnnnnnnnnnnnnnnnnnnnnnnnnnnnnnnnnnnnnnnnnnnnnnnnnnnnnnnnnnnnnnnnnnnnnnnnnnnnnnnnnnnnnnnnnnnnnnnnnnnnnnnnnnnnnnnnnnnnnnnnnnnnnnnnnnnnnnnnnnnnnnnnnnnnnnnnnnnnnnnnnnnnnnnnnnnnnnnnnnnnnnnnnnnnnnnnnnnnnnnnnnnnnnnnnnnnnnnnnnnnnnnnnnnnnnnnnnnnnnnnnnnnnnnnnnnnnnnnnnnnnnnnnnnnnnnnnnnnnnnnnnnnnnnnnnnnnnnnnnnnnnnnnnnnnnnnnnnnnnnnnnnnnnnnnnnnnnnnnnnnnnnnnnnnnnnnnnnnnnnnnnnnnnnnnnnnnnnnnnnnnnnnnnnnnnnnnnnnnnnnnnnnnnnnnnnnnnnnnnnnnnnnnnnnnnnnnnnnnnnnnnnnnnnnnnnnnnnnnnnnnnnnnnnnnnnnnnnnnnnnnnnnnnnnnnnnnnnnnnnnnnnnnnnnnnnnnnnnnnnnnnnnnnnnnnnnnnnnnnnnnnnnnnnnnnnnnnnnnnnnnnnnnnnnnnnnnnnnnnnnnnnnnnnnnnnnnnnnnnnnnnnnnnnnnnnnnnnnnnnnnnnnnnnnnnnnnnnnnnnnnnnnnnnnnnnnnnnnnnnnnnnnnnnnnnnnnnnnnnnnnnnnnnnnnnnnnnnnnnnnnnnnnnnnnnnnnnnnnnnnnnnnnnnnnnnnnnnnnnnnnnnnnnnnnnnnnnnnnnnnnnnnnnnnnnnnnnnnnnnnnnnnnnnnnnnnnnnnnnnnnnnnnnnnnnnnnnnnnnnnnnnnnnnnnnnnnnnnnnnnnnnnnnnnnnnnnnnnnnnnnnnnnnnnnnnnnnnnnnnnnnnnnnnnnnnnnnnnnnnnnnnnnnnnnnnnnnnnnnnnnnnnnnnnnnnnnnnnnnnnnnnnnnnnnnnnnnnnnnnnnnnnnnnnnnnnnnnnnnnnnnnnnnnnnnnnnnnnnnnnnnnnnnnnnnnnnnnnnnnnnnnnnnnnnnnnnnnnnnnnnnnnnnnnnnnnnnnnnnnnnnnnnnnnnnnnnnnnnnnnnnnnnnnnnnnnnnnnnnnnnnnnnnnnnnnnnnnnnnnnnnnnnnnnnnnnnnnnnnnnnnnnnnnnnnnnnnnnnnnnnnnnnnnnnnnnnnnnnnnnnnnnnnnnnnnnnnnnnnnnnnnnnnnnnnnnnnnnnnnnnnnnnnnnnnnnnnnnnnnnnnnnnnnnnnnnnnnnnnnnnnnnnnnnnnnnnnnnnnnnnnnnnnnnnnnnnnnnnnnnnnnnnnnnnnnnnnnnnnnnnnnnnnnnnnnnnnnnnnnnnnnnnnnnnnnnnnnnnnnnnnnnnnnnnnnnnnnnnnnnnnnnnnnnnnnnnnnnnnnnnnnnnnnnnnnnnnnnnnnnnnnnnnnnnnnnnnnnnnnnnnnnnnnnnnnnnnnnnnnnnnnnnnnnnnnnnnnnnnnnnnnnnnnnnnnnnnnnnnnnnnnnnnnnnnnnnnnnnnnnnnnnnnnnnnnnnnnnnnnnnnnnnnnnnnnnnnnnnnnnnnnnnnnnnnnnnnnnnnnnnnnnnnnnnnnnnnnnnnnnnnnnnnnnnnnnnnnnnnnnnnnnnnnnnnnnnnnnnnnnnnnnnnnnnnnnnnnnnnnnnnnnnnnnnnnnnnnnnnnnnnnnnnnnnnnnnnnnnnnnnnnnnnnnnnnnnnnnnnnnnnnnnnnnnnnnnnnnnnnnnnnnnnnnnnnnnnnnnnnnnnnnnnnnnnnnnnnnnnnnnnnnnnnnnnnnnnnnnnnnnnnnnnnnnnnnnnnnnnnnnnnnnnnnnnnnnnnnnnnnnnnnnnnnnnnnnnnnnnnnnnnnnnnnnnnnnnnnnnnnnnnnnnnnnnnnnnnnnnnnnnnnnnnnnnnnnnnnnnnnnnnnnnnnnnnnnnnnnnnnnnnnnnnnnnnnnnnnnnnnnnnnnnnnnnnnnnnnnnnnnnnnnnnnnnnnnnnnnnnnnnnnnnnnnnnnnnnnnnnnnnnnnnnnnnnnnnnnnnnnnnnnnnnnnnnnnnnnnnnnnnnnnnnnnnnnnnnnnnnnnnnnnnnnnnnnnnnnnnnnnnnnnnnnnnnnnnnnnnnnnnnnnnnnnnnnnnnnnnnnnnnnnnnnnnnnnnnnnnnnnnnnnnnnnnnnnnnnnnnnnnnnnnnnnnnnnnnnnnnnnnnnnnnnnnnnnnnnnnnnnnnnnnnnnnnnnnnnnnnnnnnnnnnnnnnnnnnnnnnnnnnnnnnnnnnnnnnnnnnnnnnnnnnnnnnnnnnnnnnnnnnnnnnnnnnnnnnnnnnnnnnnnnnnnnnnnnnnnnnnnnnnnnnnnnnnnnnnnnnnnnnnnnnnnnnnnnnnnnnnnnnnnnnnnnnnnnnnnnnnnnnnnnnnnnnnnnnnnnnnnnnnnnnnnnnnnnnnnnnnnnnnnnnnnnnnnnnnnnnnnnnnnnnnnnnnnnnnnnnnnnnnnnnnnnnnnnnnnnnnnnnnnnnnnnnnnnnnnnnnnnnnnnnnnnnnnnnnnnnnnnnnnnnnnnnnnnnnnnnnnnnnnnnnnnnnnnnnnnnnnnnnnnnnnnnnnnnnnnnnnnnnnnnnnnnnnnnnnnnnnnnnnnnnnnnnnnnnnnnnnnnnnnnnnnnnnnnnnnnnnnnnnnnnnnnnnnnnnnnnnnnnnnnnnnnnnnnnnnnnnnnnnnnnnnnnnnnnnnnnnnnnnnnnnnnnnnnnnnnnnnnnnnnnnnnnnnnnnnnnnnnnnnnnnnnnnnnnnnnnnnnnnnnnnnnnnnnnnnnnnnnnnnnnnnnnnnnnnnnnnnnnnnnnnnnnnnnnnnnnnnnnnnnnnnnnnnnnnnnnnnnnnnnnnnnnnnnnnnnnnnnnnnnnnnnnnnnnnnnnnnnnnnnnnnnnnnnnnnnnnnnnnnnnnnnnnnnnnnnnnnnnnnnnnnnnnnnnnnnnnnnnnnnnnnnnnnnnnnnnnnnnnnnnnnnnnnnnnnnnnnnnnnnnnnnnnnnnnnnnnnnnnnnnnnnnnnnnnnnnnnnnnnnnnnnnnnnnnnnnnnnnnnnnnnnnnnnnnnnnnnnnnnnnnnnnnnnnnnnnnnnnnnnnnnnnnnnnnnnnnnnnnnnnnnnnnnnnnnnnnnnnnnnnnnnnnnnnnnnnnnnnnnnnnnnnnnnnnnnnnnnnnnnnnnnnnnnnnnnnnnnnnnnnnnnnnnnnnnnnnnnnnnnnnnnnnnnnnnnnnnnnnnnnnnnnnnnnnnnnnnnnnnnnnnnnnnnnnnnnnnnnnnnnnnnnnnnnnnnnnnnnnnnnnnnnnnnnnnnnnnnnnnnnnnnnnnnnnnnnnnnnnnnnnnnnnnnnnnnnnnnnnnnnnnnnnnnnnnnnnnnnnnnnnnnnnnnnnnnnnnnnnnnnnnnnnnnnnnnnnnnnnnnnnnnnnnnnnnnnnnnnnnnnnnnnnnnnnnnnnnnnnnnnnnnnnnnnnnnnnnnnnnnnnnnnnnnnnnnnnnnnnnnnnnnnnnnnnnnnnnnnnnnnnnnnnnnnnnnnnnnnnnnnnnnnnnnnnnnnnnnnnnnnnnnnnnnnnnnnnnnnnnnnnnnnnnnnnnnnnnnnnnnnnnnnnnnnnnnnnnnnnnnnnnnnnnnnnnnnnnnnnnnnnnnnnnnnnnnnnnnnnnnnnnnnnnnnnnnnnnnnnnnnnnnnnnnnnnnnnnnnnnnnnnnnnnnnnnnnnnnnnnnnnnnnnnnnnnnnnnnnnnnnnnnnnnnnnnnnnnnnnnnnnnnnnnnnnnnnnnnnnnnnnnnnnnnnnnnnnnnnnnnnnnnnnnnnnnnnnnnnnnnnnnnnnnnnnnnnnnnnnnnnnnnnnnnnnnnnnnnnnnnnnnnnnnnnnnnnnnnnnnnnnnnnnnnnnnnnnnnnnnnnnnnnnnnnnnnnnnnnnnnnnnnnnnnnnnnnnnnnnnnnnnnnnnnnnnnnnnnnnnnnnnnnnnnnnnnnnnnnnnnnnnnnnnnnnnnnnnnnnnnnnnnnnnnnnnnnnnnnnnnnnnnnnnnnnnnnnnnnnnnnnnnnnnnnnnnnnnnnnnnnnnnnnnnnnnnnnnnnnnnnnnnnnnnnnnnnnnnnnnnnnnnnnnnnnnnnnnnnnnnnnnnnnnnnnnnnnnnnnnnnnnnnnnnnnnnnnnnnnnnnnnnnnnnnnnnnnnnnnnnnnnnnnnnnnnnnnnnnnnnnnnnnnnnnnnnnnnnnnnnnnnnnnnnnnnnnnnnnnnnnnnnnnnnnnnnnnnnnnnnnnnnnnnnnnnnnnnnnnnnnnnnnnnnnnnnnnnnnnnnnnnnnnnnnnnnnnnnnnnnnnnnnnnnnnnnnnnnnnnnnnnnnnnnnnnnnnnnnnnnnnnnnnnnnnnnnnnnnnnnnnnnnnnnnnnnnnnnnnnnnnnnnnnnnnnnnnnnnnnnnnnnnnnnnnnnnnnnnnnnnnnnnnnnnnnnnnnnnnnnnnnnnnnnnnnnnnnnnnnnnnnnnnnnnnnnnnnnnnnnnnnnnnnnnnnnnnnnnnnnnnnnnnnnnnnnnnnnnnnnnnnnnnnnnnnnnnnnnnnnnnnnnnnnnnnnnnnnnnnnnnnnnnnnnnnnnnnnnnnnnnnnnnnnnnnnnnnnnnnnnnnnnnnnnnnnnnnnnnnnnnnnnnnnnnnnnnnnnnnnnnnnnnnnnnnnnnnnnnnnnnnnnnnnnnnnnnnnnnnnnnnnnnnnnnnnnnnnnnnnnnnnnnnnnnnnnnnnnnnnnnnnnnnnnnnnnnnnnnnnnnnnnnnnnnnnnnnnnnnnnnnnnnnnnnnnnnnnnnnnnnnnnnnnnnnnnnnnnnnnnnnnnnnnnnnnnnnnnnnnnnnnnnnnnnnnnnnnnnnnnnnnnnnnnnnnnnnnnnnnnnnnnnnnnnnnnnnnnnnnnnnnnnnnnnnnnnnnnnnnnnnnnnnnnnnnnnnnnnnnnnnnnnnnnnnnnnnnnnnnnnnnnnnnnnnnnnnnnnnnnnnnnnnnnnnnnnnnnnnnnnnnnnnnnnnnnnnnnnnnnnnnnnnnnnnnnnnnnnnnnnnnnnnnnnnnnnnnnnnnnnnnnnnnnnnnnnnnnnnnnnnnnnnnnnnnnnnnnnnnnnnnnnnnnnnnnnnnnnnnnnnnnnnnnnnnnnnnnnnnnnnnnnnnnnnnnnnnnnnnnnnnnnnnnnnnnnnnnnnnnnnnnnnnnnnnnnnnnnnnnnnnnnnnnnnnnnnnnnnnnnnnnnnnnnnnnnnnnnnnnnnnnnnnnnnnnnnnnnnnnnnnnnnnnnnnnnnnnnnnnnnnnnnnnnnnnnnnnnnnnnnnnnnnnnnnnnnnnnnnnnnnnnnnnnnnnnnnnnnnnnnnnnnnnnnnnnnnnnnnnnnnnnnnnnnnnnnnnnnnnnnnnnnnnnnnnnnnnnnnnnnnnnnnnnnnnnnnnnnnnnnnnnnnnnnnnnnnnnnnnnnnnnnnnnnnnnnnnnnnnnnnnnnnnnnnnnnnnnnnnnnnnnnnnnnnnnnnnnnnnnnnnnnnnnnnnnnnnnnnnnnnnnnnnnnnnnnnnnnnnnnnnnnnnnnnnnnnnnnnnnnnnnnnnnnnnnnnnnnnnnnnnnnnnnnnnnnnnnnnnnnnnnnnnnnnnnnnnnnnnnnnnnnnnnnnnnnnnnnnnnnnnnnnnnnnnnnnnnnnnnnnnnnnnnnnnnnnnnnnnnnnnnnnnnnnnnnnnnnnnnnnnnnnnnnnnnnnnnnnnnnnnnnnnnnnnnnnnnnnnnnnnnnnnnnnnnnnnnnnnnnnnnnnnnnnnnnnnnnnnnnnnnnnnnnnnnnnnnnnnnnnnnnnnnnnnnnnnnnnnnnnnnnnnnnnnnnnnnnnnnnnnnnnnnnnnnnnnnnnnnnnnnnnnnnnnnnnnnnnnnnnnnnnnnnnnnnnnnnnnnnnnnnnnnnnnnnnnnnnnnnnnnnnnnnnnnnnnnnnnnnnnnnnnnnnnnnnnnnnnnnnnnnnnnnnnnnnnnnnnnnnnnnnnnnnnnnnnnnnnnnnnnnnnnnnnnnnnnnnnnnnnnnnnnnnnnnnnnnnnnnnnnnnnnnnnnnnnnnnnnnnnnnnnnnnnnnnnnnnnnnnnnnnnnnnnnnnnnnnnnnnnnnnnnnnnnnnnnnnnnnnnnnnnnnnnnnnnnnnnnnnnnnnnnnnnnnnnnnnnnnnnnnnnnnnnnnnnnnnnnnnnnnnnnnnnnnnnnnnnnnnnnnnnnnnnnnnnnnnnnnnnnnnnnnnnnnnnnnnnnnnnnnnnnnnnnnnnnnnnnnnnnnnnnnnnnnnnnnnnnnnnnnnnnnnnnnnnnnnnnnnnnnnnnnnnnnnnnnnnnnnnnnnnnnnnnnnnnnnnnnnnnnnnnnnnnnnnnnnnnnnnnnnnnnnnnnnnnnnnnnnnnnnnnnnnnnnnnnnnnnnnnnnnnnnnnnnnnnnnnnnnnnnnnnnnnnnnnnnnnnnnnnnnnnnnnnnnnnnnnnnnnnnnnnnnnnnnnnnnnnnnnnnnnnnnnnnnnnnnnnnnnnnnnnnnnnnnnnnnnnnnnnnnnnnnnnnnnnnnnnnnnnnnnnnnnnnnnnnnnnnnnnnnnnnnnnnnnnnnnnnnnnnnnnnnnnnnnnnnnnnnnnnnnnnnnnnnnnnnnnnnnnnnnnnnnnnnnnnnnnnnnnnnnnnnnnnnnnnnnnnnnnnnnnnnnnnnnnnnnnnnnnnnnnnnnnnnnnnnnnnnnnnnnnnnnnnnnnnnnnnnnnnnnnnnnnnnnnnnnnnnnnnnnnnnnnnnnnnnnnnnnnnnnnnnnnnnnnnnnnnnnnnnnnnnnnnnnnnnnnnnnnnnnnnnnnnnnnnnnnnnnnnnnnnnnnnnnnnnnnnnnnnnnnnnnnnnnnnnnnnnnnnnnnnnnnnnnnnnnnnnnnnnnnnnnnnnnnnnnnnnnnnnnnnnnnnnnnnnnnnnnnnnnnnnnnnnnnnnnnnnnnnnnnnnnnnnnnnnnnnnnnnnnnnnnnnnnnnnnnnnnnnnnnnnnnnnnnnnnnnnnnnnnnnnnnnnnnnnnnnnnnnnnnnnnnnnnnnnnnnnnnnnnnnnnnnnnnnnnnnnnnnnnnnnnnnnnnnnnnnnnnnnnnnnnnnnnnnnnnnnnnnnnnnnnnnnnnnnnnnnnnnnnnnnnnnnnnnnnnnnnnnnnnnnnnnnnnnnnnnnnnnnnnnnnnnnnnnnnnnnnnnnnnnnnnnnnnnnnnnnnnnnnnnnnnnnnnnnnnnnnnnnnnnnnnnnnnnnnnnnnnnnnnnnnnnnnnnnnnnnnnnnnnnnnnnnnnnnnnnnnnnnnnnnnnnnnnnnnnnnnnnnnnnnnnnnnnnnnnnnnnnnnnnnnnnnnnnnnnnnnnnnnnnnnnnnnnnnnnnnnnnnnnnnnnnnnnnnnnnnnnnnnnnnnnnnnnnnnnnnnnnnnnnnnnnnnnnnnnnnnnnnnnnnnnnnnnnnnnnnnnnnnnnnnnnnnnnnnnnnnnnnnnnnnnnnnnnnnnnnnnnnnnnnnnnnnnnnnnnnnnnnnnnnnnnnnnnnnnnnnnnnnnnnnnnnnnnnnnnnnnnnnnnnnnnnnnnnnnnnnnnnnnnnnnnnnnnnnnnnnnnnnnnnnnnnnnnnnnnnnnnnnnnnnnnnnnnnnnnnnnnnnnnnnnnnnnnnnnnnnnnnnnnnnnnnnnnnnnnnnnnnnnnnnnnnnnnnnnnnnnnnnnnnnnnnnnnnnnnnnnnnnnnnnnnnnnnnnnnnnnnnnnnnnnnnnnnnnnnnnnnnnnnnnnnnnnnnnnnnnnnnnnnnnnnnnnnnnnnnnnnnnnnnnnnnnnnnnnnnnnnnnnnnnnnnnnnnnnnnnnnnnnnnnnnnnnnnnnnnnnnnnnnnnnnnnnnnnnnnnnnnnnnnnnnnnnnnnnnnnnnnnnnnnnnnnnnnnnnnnnnnnnnnnnnnnnnnnnnnnnnnnnnnnnnnnnnnnnnnnnnnnnnnnnnnnnnnnnnnnnnnnnnnnnnnnnnnnnnnnnnnnnnnnnnnnnnnnnnnnnnnnnnnnnnnnnnnnnnnnnnnnnnnnnnnnnnnnnnnnnnnnnnnnnnnnnnnnnnnnnnnnnnnnnnnnnnnnnnnnnnnnnnnnnnnnnnnnnnnnnnnnnnnnnnnnnnnnnnnnnnnnnnnnnnnnnnnnnnnnnnnnnnnnnnnnnnnnnnnnnnnnnnnnnnnnnnnnnnnnnnnnnnnnnnnnnnnnnnnnnnnnnnnnnnnnnnnnnnnnnnnnnnnnnnnnnnnnnnnnnnnnnnnnnnnnnnnnnnnnnnnnnnnnnnnnnnnnnnnnnnnnnnnnnnnnnnnnnnnnnnnnnnnnnnnnnnnnnnnnnnnnnnnnnnnnnnnnnnnnnnnnnnnnnnnnnnnnnnnnnnnnnnnnnnnnnnnnnnnnnnnnnnnnnnnnnnnnnnnnnnnnnnnnnnnnnnnnnnnnnnnnnnnnnnnnnnnnnnnnnnnnnnnnnnnnnnnnnnnnnnnnnnnnnnnnnnnnnnnnnnnnnnnnnnnnnnnnnnnnnnnnnnnnnnnnnnnnnnnnnnnnnnnnnnnnnnnnnnnnnnnnnnnnnnnnnnnnnnnnnnnnnnnnnnnnnnnnnnnnnnnnnnnnnnnnnnnnnnnnnnnnnnnnnnnnnnnnnnnnnnnnnnnnnnnnnnnnnnnnnnnnnnnnnnnnnnnnnnnnnnnnnnnnnnnnnnnnnnnnnnnnnnnnnnnnnnnnnnnnnnnnnnnnnnnnnnnnnnnnnnnnnnnnnnnnnnnnnnnnnnnnnnnnnnnnnnnnnnnnnnnnnnnnnnnnnnnnnnnnnnnnnnnnnnnnnnnnnnnnnnnnnnnnnnnnnnnnnnnnnnnnnnnnnnnnnnnnnnnnnnnnnnnnnnnnnnnnnnnnnnnnnnnnnnnnnnnnnnnnnnnnnnnnnnnnnnnnnnnnnnnnnnnnnnnnnnnnnnnnnnnnnnnnnnnnnnnnnnnnnnnnnnnnnnnnnnnnnnnnnnnnnnnnnnnnnnnnnnnnnnnnnnnnnnnnnnnnnnnnnnnnnnnnnnnnnnnnnnnnnnnnnnnnnnnnnnnnnnnnnnnnnnnnnnnnnnnnnnnnnnnnnnnnnnnnnnnnnnnnnnnnnnnnnnnnnnnnnnnnnnnnnnnnnnnnnnnnnnnnnnnnnnnnnnnnnnnnnnnnnnnnnnnnnnnnnnnnnnnnnnnnnnnnnnnnnnnnnnnnnnnnnnnnnnnnnnnnnnnnnnnnnnnnnnnnnnnnnnnnnnnnnnnnnnnnnnnnnnnnnnnnnnnnnnnnnnnnnnnnnnnnnnnnnnnnnnnnnnnnnnnnnnnnnnnnnnnnnnnnnnnnnnnnnnnnnnnnnnnnnnnnnnnnnnnnnnnnnnnnnnnnnnnnnnnnnnnnnnnnnnnnnnnnnnnnnnnnnnnnnnnnnnnnnnnnnnnnnnnnnnnnnnnnnnnnnnnnnnnnnnnnnnnnnnnnnnnnnnnnnnnnnnnnnnnnnnnnnnnnnnnnnnnnnnnnnnnnnnnnnnnnnnnnnnnnnnnnnnnnnnnnnnnnnnnnnnnnnnnnnnnnnnnnnnnnnnnnnnnnnnnnnnnnnnnnnnnnnnnnnnnnnnnnnnnnnnnnnnnnnnnnnnnnnnnnnnnnnnnnnnnnnnnnnnnnnnnnnnnnnnnnnnnnnnnnnnnnnnnnnnnnnnnnnnnnnnnnnnnnnnnnnnnnnnnnnnnnnnnnnnnnnnnnnnnnnnnnnnnnnnnnnnnnnnnnnnnnnnnnnnnnnnnnnnnnnnnnnnnnnnnnnnnnnnnnnnnnnnnnnnnnnnnnnnnnnnnnnnnnnnnnnnnnnnnnnnnnnnnnnnnnnnnnnnnnnnnnnnnnnnnnnnnnnnnnnnnnnnnnnnnnnnnnnnnnnnnnnnnnnnnnnnnnnnnnnnnnnnnnnnnnnnnnnnnnnnnnnnnnnnnnnnnnnnnnnnnnnnnnnnnnnnnnnnnnnnnnnnnnnnnnnnnnnnnnnnnnnnnnnnnnnnnnnnnnnnnnnnnnnnnnnnnnnnnnnnnnnnnnnnnnnnnnnnnnnnnnnnnnnnnnnnnnnnnnnnnnnnnnnnnnnnnnnnnnnnnnnnnnnnnnnnnnnnnnnnnnnnnnnnnnnnnnnnnnnnnnnnnnnnnnnnnnnnnnnnnnnnnnnnnnnnnnnnnnnnnnnnnnnnnnnnnnnnnnnnnnnnnnnnnnnnnnnnnnnnnnnnnnnnnnnnnnnnnnnnnnnnnnnnnnnnnnnnnnnnnnnnnnnnnnnnnnnnnnnnnnnnnnnnnnnnnnnnnnnnnnnnnnnnnnnnnnnnnnnnnnnnnnnnnnnnnnnnnnnnnnnnnnnnnnnnnnnnnnnnnnnnnnnnnnnnnnnnnnnnnnnnnnnnnnnnnnnnnnnnnnnnnnnnnnnnnnnnnnnnnnnnnnnnnnnnnnnnnnnnnnnnnnnnnnnnnnnnnnnnnnnnnnnnnnnnnnnnnnnnnnnnnnnnnnnnnnnnnnnnnnnnnnnnnnnnnnnnnnnnnnnnnnnnnnnnnnnnnnnnnnnnnnnnnnnnnnnnnnnnnnnnnnnnnnnnnnnnnnnnnnnnnnnnnnnnnnnnnnnnnnnnnnnnnnnnnnnnnnnnnnnnnnnnnnnnnnnnnnnnnnnnnnnnnnnnnnnnnnnnnnnnnnnnnnnnnnnnnnnnnnnnnnnnnnnnnnnnnnnnnnnnnnnnnnnnnnnnnnnnnnnnnnnnnnnnnnnnnnnnnnnnnnnnnnnnnnnnnnnnnnnnnnnnnnnnnnnnnnnnnnnnnnnnnnnnnnnnnnnnnnnnnnnnnnnnnnnnnnnnnnnnnnnnnnnnnnnnnnnnnnnnnnnnnnnnnnnnnnnnnnnnnnnnnnnnnnnnnnnnnnnnnnnnnnnnnnnnnnnnnnnnnnnnnnnnnnnnnnnnnnnnnnnnnnnnnnnnnnnnnnnnnnnnnnnnnnnnnnnnnnnnnnnnnnnnnnnnnnnnnnnnnnnnnnnnnnnnnnnnnnnnnnnnnnnnnnnnnnnnnnnnnnnnnnnnnnnnnnnnnnnnnnnnnnnnnnnnnnnnnnnnnnnnnnnnnnnnnnnnnnnnnnnnnnnnnnnnnnnnnnnnnnnnnnnnnnnnnnnnnnnnnnnnnnnnnnnnnnnnnnnnnnnnnnnnnnnnnnnnnnnnnnnnnnnnnnnnnnnnnnnnnnnnnnnnnnnnnnnnnnnnnnnnnnnnnnnnnnnnnnnnnnnnnnnnnnnnnnnnnnnnnnnnnnnnnnnnnnnnnnnnnnnnnnnnnnnnnnnnnnnnnnnnnnnnnnnnnnnnnnnnnnnnnnnnnnnnnnnnnnnnnnnnnnnnnnnnnnnnnnnnnnnnnnnnnnnnnnnnnnnnnnnnnnnnnnnnnnnnnnnnnnnnnnnnnnnnnnnnnnnnnnnnnnnnnnnnnnnnnnnnnnnnnnnnnnnnnnnnnnnnnnnnnnnnnnnnnnnnnnnnnnnnnnnnnnnnnnnnnnnnnnnnnnnnnnnnnnnnnnnnnnnnnnnnnnnnnnnnnnnnnnnnnnnnnnnnnnnnnnnnnnnnnnnnnnnnnnnnnnnnnnnnnnnnnnnnnnnnnnnnnnnnnnnnnnnnnnnnnnnnnnnnnnnnnnnnnnnnnnnnnnnnnnnnnnnnnnnnnnnnnnnnnnnnnnnnnnnnnnnnnnnnnnnnnnnnnnnnnnnnnnnnnnnnnnnnnnnnnnnnnnnnnnnnnnnnnnnnnnnnnnnnnnnnnnnnnnnnnnnnnnnnnnnnnnnnnnnnnnnnnnnnnnnnnnnnnnnnnnnnnnnnnnnnnnnnnnnnnnnnnnnnnnnnnnnnnnnnnnnnnnnnnnnnnnnnnnnnnnnnnnnnnnnnnnnnnnnnnnnnnnnnnnnnnnnnnnnnnnnnnnnnnnnnnnnnnnnnnnnnnnnnnnnnnnnnnnnnnnnnnnnnnnnnnnnnnnnnnnnnnnnnnnnnnnnnnnnnnnnnnnnnnnnnnnnnnnnnnnnnnnnnnnnnnnnnnnnnnnnnnnnnnnnnnnnnnnnnnnnnnnnnnnnnnnnnnnnnnnnnnnnnnnnnnnnnnnnnnnnnnnnnnnnnnnnnnnnnnnnnnnnnnnnnnnnnnnnnnnnnnnnnnnnnnnnnnnnnnnnnnnnnnnnnnnnnnnnnnnnnnnnnnnnnnnnnnnnnnnnnnnnnnnnnnnnnnnnnnnnnnnnnnnnnnnnnnnnnnnnnnnnnnnnnnnnnnnnnnnnnnnnnnnnnnnnnnnnnnnnnnnnnnnnnnnnnnnnnnnnnnnnnnnnnnnnnnnnnnnnnnnnnnnnnnnnnnnnnnnnnnnnnnnnnnnnnnnnnnnnnnnnnnnnnnnnnnnnnnnnnnnnnnnnnnnnnnnnnnnnnnnnnnnnnnnnnnnnnnnnnnnnnnnnnnnnnnnnnnnnnnnnnnnnnnnnnnnnnnnnnnnnnnnnnnnnnnnnnnnnnnnnnnnnnnnnnnnnnnnnnnnnnnnnnnnnnnnnnnnnnnnnnnnnnnnnnnnnnnnnnnnnnnnnnnnnnnnnnnnnnnnnnnnnnnnnnnnnnnnnnnnnnnnnnnnnnnnnnnnnnnnnnnnnnnnnnnnnnnnnnnnnnnnnnnnnnnnnnnnnnnnnnnnnnnnnnnnnnnnnnnnnnnnnnnnnnnnnnnnnnnnnnnnnnnnnnnnnnnnnnnnnnnnnnnnnnnnnnnnnnnnnnnnnnnnnnnnnnnnnnnnnnnnnnnnnnnnnnnnnnnnnnnnnnnnnnnnnnnnnnnnnnnnnnnnnnnnnnnnnnnnnnnnnnnnnnnnnnnnnnnnnnnnnnnnnnnnnnnnnnnnnnnnnnnnnnnnnnnnnnnnnnnnnnnnnnnnnnnnnnnnnnnnnnnnnnnnnnnnnnnnnnnnnnnnnnnnnnnnnnnnnnnnnnnnnnnnnnnnnnnnnnnnnnnnnnnnnnnnnnnnnnnnnnnnnnnnnnnnnnnnnnnnnnnnnnnnnnnnnnnnnnnnnnnnnnnnnnnnnnnnnnnnnnnnnnnnnnnnnnnnnnnnnnnnnnnnnnnnnnnnnnnnnnnnnnnnnnnnnnnnnnnnnnnnnnnnnnnnnnnnnnnnnnnnnnnnnnnnnnnnnnnnnnnnnnnnnnnnnnnnnnnnnnnnnnnnnnnnnnnnnnnnnnnnnnnnnnnnnnnnnnnnnnnnnnnnnnnnnnnnnnnnnnnnnnnnnnnnnnnnnnnnnnnnnnnnnnnnnnnnnnnnnnnnnnnnnnnnnnnnnnnnnnnnnnnnnnnnnnnnnnnnnnnnnnnnnnnnnnnnnnnnnnnnnnnnnnnnnnnnnnnnnnnnnnnnnnnnnnnnnnnnnnnnnnnnnnnnnnnnnnnnnnnnnnnnnnnnnnnnnnnnnnnnnnnnnnnnnnnnnnnnnnnnnnnnnnnnnnnnnnnnnnnnnnnnnnnnnnnnnnnnnnnnnnnnnnnnnnnnnnnnnnnnnnnnnnnnnnnnnnnnnnnnnnnnnnnnnnnnnnnnnnnnnnnnnnnnnnnnnnnnnnnnnnnnnnnnnnnnnnnnnnnnnnnnnnnnnnnnnnnnnnnnnnnnnnnnnnnnnnnnnnnnnnnnnnnnnnnnnnnnnnnnnnnnnnnnnnnnnnnnnnnnnnnnnnnnnnnnnnnnnnnnnnnnnnnnnnnnnnnnnnnnnnnnnnnnnnnnnnnnnnnnnnnnnnnnnnnnnnnnnnnnnnnnnnnnnnnnnnnnnnnnnnnnnnnnnnnnnnnnnnnnnnnnnnnnnnnnnnnnnnnnnnnnnnnnnnnnnnnnnnnnnnnnnnnnnnnnnnnnnnnnnnnnnnnnnnnnnnnnnnnnnnnnnnnnnnnnnnnnnnnnnnnnnnnnnnnnnnnnnnnnnnnnnnnnnnnnnnnnnnnnnnnnnnnnnnnnnnnnnnnnnnnnnnnnnnnnnnnnnnnnnnnnnnnnnnnnnnnnnnnnnnnnnnnnnnnnnnnnnnnnnnnnnnnnnnnnnnnnnnnnnnnnnnnnnnnnnnnnnnnnnnnnnnnnnnnnnnnnnnnnnnnnnnnnnnnnnnnnnnnnnnnnnnnnnnnnnnnnnnnnnnnnnnnnnnnnnnnnnnnnnnnnnnnnnnnnnnnnnnnnnnnnnnnnnnnnnnnnnnnnnnnnnnnnnnnnnnnnnnnnnnnnnnnnnnnnnnnnnnnnnnnnnnnnnnnnnnnnnnnnnnnnnnnnnnnnnnnnnnnnnnnnnnnnnnnnnnnnnnnnnnnnnnnnnnnnnnnnnnnnnnnnnnnnnnnnnnnnnnnnnnnnnnnnnnnnnnnnnnnnnnnnnnnnnnnnnnnnnnnnnnnnnnnnnnnnnnnnnnnnnnnnnnnnnnnnnnnnnnnnnnnnnnnnnnnnnnnnnnnnnnnnnnnnnnnnnnnnnnnnnnnnnnnnnnnnnnnnnnnnnnnnnnnnnnnnnnnnnnnnnnnnnnnnnnnnnnnnnnnnnnnnnnnnnnnnnnnnnnnnnnnnnnnnnnnnnnnnnnnnnnnnnnnnnnnnnnnnnnnnnnnnnnnnnnnnnnnnnnnnnnnnnnnnnnnnnnnnnnnnnnnnnnnnnnnnnnnnnnnnnnnnnnnnnnnnnnnnnnnnnnnnnnnnnnnnnnnnnnnnnnnnnnnnnnnnnnnnnnnnnnnnnnnnnnnnnnnnnnnnnnnnnnnnnnnnnnnnnnnnnnnnnnnnnnnnnnnnnnnnnnnnnnnnnnnnnnnnnnnnnnnnnnnnnnnnnnnnnnnnnnnnnnnnnnnnnnnnnnnnnnnnnnnnnnnnnnnnnnnnnnnnnnnnnnnnnnnnnnnnnnnnnnnnnnnnnnnnnnnnnnnnnnnnnnnnnnnnnnnnnnnnnnnnnnnnnnnnnnnnnnnnnnnnnnnnnnnnnnnnnnnnnnnnnnnnnnnnnnnnnnnnnnnnnnnnnnnnnnnnnnnnnnnnnnnnnnnnnnnnnnnnnnnnnnnnnnnnnnnnnnnnnnnnnnnnnnnnnnnnnnnnnnnnnnnnnnnnnnnnnnnnnnnnnnnnnnnnnnnnnnnnnnnnnnnnnnnnnnnnnnnnnnnnnnnnnnnnnnnnnnnnnnnnnnnnnnnnnnnnnnnnnnnnnnnnnnnnnnnnnnnnnnnnnnnnnnnnnnnnnnnnnnnnnnnnnnnnnnnnnnnnnnnnnnnnnnnnnnnnnnnnnnnnnnnnnnnnnnnnnnnnnnnnnnnnnnnnnnnnnnnnnnnnnnnnnnnnnnnnnnnnnnnnnnnnnnnnnnnnnnnnnnnnnnnnnnnnnnnnnnnnnnnnnnnnnnnnnnnnnnnnnnnnnnnnnnnnnnnnnnnnnnnnnnnnnnnnnnnnnnnnnnnnnnnnnnnnnnnnnnnnnnnnnnnnnnnnnnnnnnnnnnnnnnnnnnnnnnnnnnnnnnnnnnnnnnnnnnnnnnnnnnnnnnnnnnnnnnnnnnnnnnnnnnnnnnnnnnnnnnnnnnnnnnnnnnnnnnnnnnnnnnnnnnnnnnnnnnnnnnnnnnnnnnnnnnnnnnnnnnnnnnnnnnnnnnnnnnnnnnnnnnnnnnnnnnnnnnnnnnnnnnnnnnnnnnnnnnnnnnnnnnnnnnnnnnnnnnnnnnnnnnnnnnnnnnnnnnnnnnnnnnnnnnnnnnnnnnnnnnnnnnnnnnnnnnnnnnnnnnnnnnnnnnnnnnnnnnnnnnnnnnnnnnnnnnnnnnnnnnnnnnnnnnnnnnnnnnnnnnnnnnnnnnnnnnnnnnnnnnnnnnnnnnnnnnnnnnnnnnnnnnnnnnnnnnnnnnnnnnnnnnnnnnnnnnnnnnnnnnnnnnnnnnnnnnnnnnnnnnnnnnnnnnnnnnnnnnnnnnnnnnnnnnnnnnnnnnnnnnnnnnnnnnnnnnnnnnnnnnnnnnnnnnnnnnnnnnnnnnnnnnnnnnnnnnnnnnnnnnnnnnnnnnnnnnnnnnnnnnnnnnnnnnnnnnnnnnnnnnnnnnnnnnnnnnnnnnnnnnnnnnnnnnnnnnnnnnnnnnnnnnnnnnnnnnnnnnnnnnnnnnnnnnnnnnnnnnnnnnnnnnnnnnnnnnnnnnnnnnnnnnnnnnnnnnnnnnnnnnnnnnnnnnnnnnnnnnnnnnnnnnnnnnnnnnnnnnnnnnnnnnnnnnnnnnnnnnnnnnnnnnnnnnnnnnnnnnnnnnnnnnnnnnnnnnnnnnnnnnnnnnnnnnnnnnnnnnnnnnnnnnnnnnnnnnnnnnnnnnnnnnnnnnnnnnnnnnnnnnnnnnnnnnnnnnnnnnnnnnnnnnnnnnnnnnnnnnnnnnnnnnnnnnnnnnnnnnnnnnnnnnnnnnnnnnnnnnnnnnnnnnnnnnnnnnnnnnnnnnnnnnnnnnnnnnnnnnnnnnnnnnnnnnnnnnnnnnnnnnnnnnnnnnnnnnnnnnnnnnnnnnnnnnnnnnnnnnnnnnnnnnnnnnnnnnnnnnnnnnnnnnnnnnnnnnnnnnnnnnnnnnnnnnnnnnnnnnnnnnnnnnnnnnnnnnnnnnnnnnnnnnnnnnnnnnnnnnnnnnnnnnnnnnnnnnnnnnnnnnnnnnnnnnnnnnnnnnnnnnnnnnnnnnnnnnnnnnnnnnnnnnnnnnnnnnnnnnnnnnnnnnnnnnnnnnnnnnnnnnnnnnnnnnnnnnnnnnnnnnnnnnnnnnnnnnnnnnnnnnnnnnnnnnnnnnnnnnnnnnnnnnnnnnnnnnnnnnnnnnnnnnnnnnnnnnnnnnnnnnnnnnnnnnnnnnnnnnnnnnnnnnnnnnnnnnnnnnnnnnnnnnnnnnnnnnnnnnnnnnnnnnnnnnnnnnnnnnnnnnnnnnnnnnnnnnnnnnnnnnnnnnnnnnnnnnnnnnnnnnnnnnnnnnnnnnnnnnnnnnnnnnnnnnnnnnnnnnnnnnnnnnnnnnnnnnnnnnnnnnnnnnnnnnnnnnnnnnnnnnnnnnnnnnnnnnnnnnnnnnnnnnnnnnnnnnnnnnnnnnnnnnnnnnnnnnnnnnnnnnnnnnnnnnnnnnnnnnnnnnnnnnnnnnnnnnnnnnnnnnnnnnnnnnnnnnnnnnnnnnnnnnnnnnnnnnnnnnnnnnnnnnnnnnnnnnnnnnnnnnnnnnnnnnnnnnnnnnnnnnnnnnnnnnnnnnnnnnnnnnnnnnnnnnnnnnnnnnnnnnnnnnnnnnnnnnnnnnnnnnnnnnnnnnnnnnnnnnnnnnnnnnnnnnnnnnnnnnnnnnnnnnnnnnnnnnnnnnnnnnnnnnnnnnnnnnnnnnnnnnnnnnnnnnnnnnnnnnnnnnnnnnnnnnnnnnnnnnnnnnnnnnnnnnnnnnnnnnnnnnnnnnnnnnnnnnnnnnnnnnnnnnnnnnnnnnnnnnnnnnnnnnnnnnnnnnnnnnnnnnnnnnnnnnnnnnnnnnnnnnnnnnnnnnnnnnnnnnnnnnnnnnnnnnnnnnnnnnnnnnnnnnnnnnnnnnnnnnnnnnnnnnnnnnnnnnnnnnnnnnnnnnnnnnnnnnnnnnnnnnnnnnnnnnnnnnnnnnnnnnnnnnnnnnnnnnnnnnnnnnnnnnnnnnnnnnnnnnnnnnnnnnnnnnnnnnnnnnnnnnnnnnnnnnnnnnnnnnnnnnnnnnnnnnnnnnnnnnnnnnnnnnnnnnnnnnnnnnnnnnnnnnnnnnnnnnnnnnnnnnnnnnnnnnnnnnnnnnnnnnnnnnnnnnnnnnnnnnnnnnnnnnnnnnnnnnnnnnnnnnnnnnnnnnnnnnnnnnnnnnnnnnnnnnnnnnnnnnnnnnnnnnnnnnnnnnnnnnnnnnnnnnnnnnnnnnnnnnnnnnnnnnnnnnnnnnnnnnnnnnnnnnnnnnnnnnnnnnnnnnnnnnnnnnnnnnnnnnnnnnnnnnnnnnnnnnnnnnnnnnnnnnnnnnnnnnnnnnnnnnnnnnnnnnnnnnnnnnnnnnnnnnnnnnnnnnnnnnnnnnnnnnnnnnnnnnnnnnnnnnnnnnnnnnnnnnnnnnnnnnnnnnnnnnnnnnnnnnnnnnnnnnnnnnnnnnnnnnnnnnnnnnnnnnnnnnnnnnnnnnnnnnnnnnnnnnnnnnnnnnnnnnnnnnnnnnnnnnnnnnnnnnnnnnnnnnnnnnnnnnnnnnnnnnnnnnnnnnnnnnnnnnnnnnnnnnnnnnnnnnnnnnnnnnnnnnnnnnnnnnnnnnnnnnnnnnnnnnnnnnnnnnnnnnnnnnnnnnnnnnnnnnnnnnnnnnnnnnnnnnnnnnnnnnnnnnnnnnnnnnnnnnnnnnnnnnnnnnnnnnnnnnnnnnnnnnnnnnnnnnnnnnnnnnnnnnnnnnnnnnnnnnnnnnnnnnnnnnnnnnnnnnnnnnnnnnnnnnnnnnnnnnnnnnnnnnnnnnnnnnnnnnnnnnnnnnnnnnnnnnnnnnnnnnnnnnnnnnnnnnnnnnnnnnnnnnnnnnnnnnnnnnnnnnnnnnnnnnnnnnnnnnnnnnnnnnnnnnnnnnnnnnnnnnnnnnnnnnnnnnnnnnnnnnnnnnnnnnnnnnnnnnnnnnnnnnnnnnnnnnnnnnnnnnnnnnnnnnnnnnnnnnnnnnnnnnnnnnnnnnnnnnnnnnnnnnnnnnnnnnnnnnnnnnnnnnnnnnnnnnnnnnnnnnnnnnnnnnnnnnnnnnnnnnnnnnnnnnnnnnnnnnnnnnnnnnnnnnnnnnnnnnnnnnnnnnnnnnnnnnnnnnnnnnnnnnnnnnnnnnnnnnnnnnnnnnnnnnnnnnnnnnnnnnnnnnnnnnnnnnnnnnnnnnnnnnnnnnnnnnnnnnnnnnnnnnnnnnnnnnnnnnnnnnnnnnnnnnnnnnnnnnnnnnnnnnnnnnnnnnnnnnnnnnnnnnnnnnnnnnnnnnnnnnnnnnnnnnnnnnnnnnnnnnnnnnnnnnnnnnnnnnnnnnnnnnnnnnnnnnnnnnnnnnnnnnnnnnnnnnnnnnnnnnnnnnnnnnnnnnnnnnnnnnnnnnnnnnnnnnnnnnnnnnnnnnnnnnnnnnnnnnnnnnnnnnnnnnnnnnnnnnnnnnnnnnnnnnnnnnnnnnnnnnnnnnnnnnnnnnnnnnnnnnnnnnnnnnnnnnnnnnnnnnnnnnnnnnnnnnnnnnnnnnnnnnnnnnnnnnnnnnnnnnnnnnnnnnnnnnnnnnnnnnnnnnnnnnnnnnnnnnnnnnnnnnnnnnnnnnnnnnnnnnnnnnnnnnnnnnnnnnnnnnnnnnnnnnnnnnnnnnnnnnnnnnnnnnnnnnnnnnnnnnnnnnnnnnnnnnnnnnnnnnnnnnnnnnnnnnnnnnnnnnnnnnnnnnnnnnnnnnnnnnnnnnnnnnnnnnnnnnnnnnnnnnnnnnnnnnnnnnnnnnnnnnnnnnnnnnnnnnnnnnnnnnnnnnnnnnnnnnnnnnnnnnnnnnnnnnnnnnnnnnnnnnnnnnnnnnnnnnnnnnnnnnnnnnnnnnnnnnnnnnnnnnnnnnnnnnnnnnnnnnnnnnnnnnnnnnnnnnnnnnnnnnnnnnnnnnnnnnnnnnnnnnnnnnnnnnnnnnnnnnnnnnnnnnnnnnnnnnnnnnnnnnnnnnnnnnnnnnnnnnnnnnnnnnnnnnnnnnnnnnnnnnnnnnnnnnnnnnnnnnnnnnnnnnnnnnnnnnnnnnnnnnnnnnnnnnnnnnnnnnnnnnnnnnnnnnnnnnnnnnnnnnnnnnnnnnnnnnnnnnnnnnnnnnnnnnnnnnnnnnnnnnnnnnnnnnnnnnnnnnnnnnnnnnnnnnnnnnnnnnnnnnnnnnnnnnnnnnnnnnnnnnnnnnnnnnnnnnnnnnnnnnnnnnnnnnnnnnnnnnnnnnnnnnnnnnnnnnnnnnnnnnnnnnnnnnnnnnnnnnnnnnnnnnnnnnnnnnnnnnnnnnnnnnnnnnnnnnnnnnnnnnnnnnnnnnnnnnnnnnnnnnnnnnnnnnnnnnnnnnnnnnnnnnnnnnnnnnnnnnnnnnnnnnnnnnnnnnnnnnnnnnnnnnnnnnnnnnnnnnnnnnnnnnnnnnnnnnnnnnnnnnnnnnnnnnnnnnnnnnnnnnnnnnnnnnnnnnnnnnnnnnnnnnnnnnnnnnnnnnnnnnnnnnnnnnnnnnnnnnnnnnnnnnnnnnnnnnnnnnnnnnnnnnnnnnnnnnnnnnnnnnnnnnnnnnnnnnnnnnnnnnnnnnnnnnnnnnnnnnnnnnnnnnnnnnnnnnnnnnnnnnnnnnnnnnnnnnnnnnnnnnnnnnnnnnnnnnnnnnnnnnnnnnnnnnnnnnnnnnnnnnnnnnnnnnnnnnnnnnnnnnnnnnnnnnnnnnnnnnnnnnnnnnnnnnnnnnnnnnnnnnnnnnnnnnnnnnnnnnnnnnnnnnnnnnnnnnnnnnnnnnnnnnnnnnnnnnnnnnnnnnnnnnnnnnnnnnnnnnnnnnnnnnnnnnnnnnnnnnnnnnnnnnnnnnnnnnnnnnnnnnnnnnnnnnnnnnnnnnnnnnnnnnnnnnnnnnnnnnnnnnnnnnnnnnnnnnnnnnnnnnnnnnnnnnnnnnnnnnnnnnnnnnnnnnnnnnnnnnnnnnnnnnnnnnnnnnnnnnnnnnnnnnnnnnnnnnnnnnnnnnnnnnnnnnnnnnnnnnnnnnnnnnnnnnnnnnnnnnnnnnnnnnnnnnnnnnnnnnnnnnnnnnnnnnnnnnnnnnnnnnnnnnnnnnnnnnnnnnnnnnnnnnnnnnnnnnnnnnnnnnnnnnnnnnnnnnnnnnnnnnnnnnnnnnnnnnnnnnnnnnnnnnnnnnnnnnnnnnnnnnnnnnnnnnnnnnnnnnnnnnnnnnnnnnnnnnnnnnnnnnnnnnnnnnnnnnnnnnnnnnnnnnnnnnnnnnnnnnnnnnnnnnnnnnnnnnnnnnnnnnnnnnnnnnnnnnnnnnnnnnnnnnnnnnnnnnnnnnnnnnnnnnnnnnnnnnnnnnnnnnnnnnnnnnnnnnnnnnnnnnnnnnnnnnnnnnnnnnnnnnnnnnnnnnnnnnnnnnnnnnnnnnnnnnnnnnnnnnnnnnnnnnnnnnnnnnnnnnnnnnnnnnnnnnnnnnnnnnnnnnnnnnnnnnnnnnnnnnnnnnnnnnnnnnnnnnnnnnnnnnnnnnnnnnnnnnnnnnnnnnnnnnnnnnnnnnnnnnnnnnnnnnnnnnnnnnnnnnnnnnnnnnnnnnnnnnnnnnnnnnnnnnnnnnnnnnnnnnnnnnnnnnnnnnnnnnnnnnnnnnnnnnnnnnnnnnnnnnnnnnnnnnnnnnnnnnnnnnnnnnnnnnnnnnnnnnnnnnnnnnnnnnnnnnnnnnnnnnnnnnnnnnnnnnnnnnnnnnnnnnnnnnnnnnnnnnnnnnnnnnnnnnnnnnnnnnnnnnnnnnnnnnnnnnnnnnnnnnnnnnnnnnnnnnnnnnnnnnnnnnnnnnnnnnnnnnnnnnnnnnnnnnnnnnnnnnnnnnnnnnnnnnnnnnnnnnnnnnnnnnnnnnnnnnnnnnnnnnnnnnnnnnnnnnnnnnnnnnnnnnnnnnnnnnnnnnnnnnnnnnnnnnnnnnnnnnnnnnnnnnnnnnnnnnnnnnnnnnnnnnnnnnnnnnnnnnnnnnnnnnnnnnnnnnnnnnnnnnnnnnnnnnnnnnnnnnnnnnnnnnnnnnnnnnnnnnnnnnnnnnnnnnnnnnnnnnnnnnnnnnnnnnnnnnnnnnnnnnnnnnnnnnnnnnnnnnnnnnnnnnnnnnnnnnnnnnnnnnnnnnnnnnnnnnnnnnnnnnnnnnnnnnnnnnnnnnnnnnnnnnnnnnnnnnnnnnnnnnnnnnnnnnnnnnnnnnnnnnnnnnnnnnnnnnnnnnnnnnnnnnnnnnnnnnnnnnnnnnnnnnnnnnnnnnnnnnnnnnnnnnnnnnnnnnnnnnnnnnnnnnnnnnnnnnnnnnnnnnnnnnnnnnnnnnnnnnnnnnnnnnnnnnnnnnnnnnnnnnnnnnnnnnnnnnnnnnnnnnnnnnnnnnnnnnnnnnnnnnnnnnnnnnnnnnnnnnnnnnnnnnnnnnnnnnnnnnnnnnnnnnnnnnnnnnnnnnnnnnnnnnnnnnnnnnnnnnnnnnnnnnnnnnnnnnnnnnnnnnnnnnnnnnnnnnnnnnnnnnnnnnnnnnnnnnnnnnnnnnnnnnnnnnnnnnnnnnnnnnnnnnnnnnnnnnnnnnnnnnnnnnnnnnnnnnnnnnnnnnnnnnnnnnnnnnnnnnnnnnnnnnnnnnnnnnnnnnnnnnnnnnnnnnnnnnnnnnnnnnnnnnnnnnnnnnnnnnnnnnnnnnnnnnnnnnnnnnnnnnnnnnnnnnnnnnnnnnnnnnnnnnnnnnnnnnnnnnnnnnnnnnnnnnnnnnnnnnnnnnnnnnnnnnnnnnnnnnnnnnnnnnnnnnnnnnnnnnnnnnnnnnnnnnnnnnnnnnnnnnnnnnnnnnnnnnnnnnnnnnnnnnnnnnnnnnnnnnnnnnnnnnnnnnnnnnnnnnnnnnnnnnnnnnnnnnnnnnnnnnnnnnnnnnnnnnnnnnnnnnnnnnnnnnnnnnnnnnnnnnnnnnnnnnnnnnnnnnnnnnnnnnnnnnnnnnnnnnnnnnnnnnnnnnnnnnnnnnnnnnnnnnnnnnnnnnnnnnnnnnnnnnnnnnnnnnnnnnnnnnnnnnnnnnnnnnnnnnnnnnnnnnnnnnnnnnnnnnnnnnnnnnnnnnnnnnnnnnnnnnnnnnnnnnnnnnnnnnnnnnnnnnnnnnnnnnnnnnnnnnnnnnnnnnnnnnnnnnnnnnnnnnnnnnnnnnnnnnnnnnnnnnnnnnnnnnnnnnnnnnnnnnnnnnnnnnnnnnnnnnnnnnnnnnnnnnnnnnnnnnnnnnnnnnnnnnnnnnnnnnnnnnnnnnnnnnnnnnnnnnnnnnnnnnnnnnnnnnnnnnnnnnnnnnnnnnnnnnnnnnnnnnnnnnnnnnnnnnnnnnnnnnnnnnnnnnnnnnnnnnnnnnnnnnnnnnnnnnnnnnnnnnnnnnnnnnnnnnnnnnnnnnnnnnnnnnnnnnnnnnnnnnnnnnnnnnnnnnnnnnnnnnnnnnnnnnnnnnnnnnnnnnnnnnnnnnnnnnnnnnnnnnnnnnnnnnnnnnnnnnnnnnnnnnnnnnnnnnnnnnnnnnnnnnnnnnnnnnnnnnnnnnnnnnnnnnnnnnnnnnnnnnnnnnnnnnnnnnnnnnnnnnnnnnnnnnnnnnnnnnnnnnnnnnnnnnnnnnnnnnnnnnnnnnnnnnnnnnnnnnnnnnnnnnnnnnnnnnnnnnnnnnnnnnnnnnnnnnnnnnnnnnnnnnnnnnnnnnnnnnnnnnnnnnnnnnnnnnnnnnnnnnnnnnnnnnnnnnnnnnnnnnnnnnnnnnnnnnnnnnnnnnnnnnnnnnnnnnnnnnnnnnnnnnnnnnnnnnnnnnnnnnnnnnnnnnnnnnnnnnnnnnnnnnnnnnnnnnnnnnnnnnnnnnnnnnnnnnnnnnnnnnnnnnnnnnnnnnnnnnnnnnnnnnnnnnnnnnnnnnnnnnnnnnnnnnnnnnnnnnnnnnnnnnnnnnnnnnnnnnnnnnnnnnnnnnnnnnnnnnnnnnnnnnnnnnnnnnnnnnnnnnnnnnnnnnnnnnnnnnnnnnnnnnnnnnnnnnnnnnnnnnnnnnnnnnnnnnnnnnnnnnnnnnnnnnnnnnnnnnnnnnnnnnnnnnnnnnnnnnnnnnnnnnnnnnnnnnnnnnnnnnnnnnnnnnnnnnnnnnnnnnnnnnnnnnnnnnnnnnnnnnnnnnnnnnnnnnnnnnnnnnnnnnnnnnnnnnnnnnnnnnnnnnnnnnnnnnnnnnnnnnnnnnnnnnnnnnnnnnnnnnnnnnnnnnnnnnnnnnnnnnnnnnnnnnnnnnnnnnnnnnnnnnnnnnnnnnnnnnnnnnnnnnnnnnnnnnnnnnnnnnnnnnnnnnnnnnnnnnnnnnnnnnnnnnnnnnnnnnnnnnnnnnnnnnnnnnnnnnnnnnnnnnnnnnnnnnnnnnnnnnnnnnnnnnnnnnnnnnnnnnnnnnnnnnnnnnnnnnnnnnnnnnnnnnnnnnnnnnnnnnnnnnnnnnnnnnnnnnnnnnnnnnnnnnnnnnnnnnnnnnnnnnnnnnnnnnnnnnnnnnnnnnnnnnnnnnnnnnnnnnnnnnnnnnnnnnnnnnnnnnnnnnnnnnnnnnnnnnnnnnnnnnnnnnnnnnnnnnnnnnnnnnnnnnnnnnnnnnnnnnnnnnnnnnnnnnnnnnnnnnnnnnnnnnnnnnnnnnnnnnnnnnnnnnnnnnnnnnnnnnnnnnnnnnnnnnnnnnnnnnnnnnnnnnnnnnnnnnnnnnnnnnnnnnnnnnnnnnnnnnnnnnnnnnnnnnnnnnnnnnnnnnnnnnnnnnnnnnnnnnnnnnnnnnnnnnnnnnnnnnnnnnnnnnnnnnnnnnnnnnnnnnnnnnnnnnnnnnnnnnnnnnnnnnnnnnnnnnnnnnnnnnnnnnnnnnnnnnnnnnnnnnnnnnnnnnnnnnnnnnnnnnnnnnnnnnnnnnnnnnnnnnnnnnnnnnnnnnnnnnnnnnnnnnnnnnnnnnnnnnnnnnnnnnnnnnnnnnnnnnnnnnnnnnnnnnnnnnnnnnnnnnnnnnnnnnnnnnnnnnnnnnnnnnnnnnnnnnnnnnnnnnnnnnnnnnnnnnnnnnnnnnnnnnnnnnnnnnnnnnnnnnnnnnnnnnnnnnnnnnnnnnnnnnnnnnnnnnnnnnnnnnnnnnnnnnnnnnnnnnnnnnnnnnnnnnnnnnnnnnnnnnnnnnnnnnnnnnnnnnnnnnnnnnnnnnnnnnnnnnnnnnnnnnnnnnnnnnnnnnnnnnnnnnnnnnnnnnnnnnnnnnnnnnnnnnnnnnnnnnnnnnnnnnnnnnnnnnnnnnnnnnnnnnnnnnnnnnnnnnnnnnnnnnnnnnnnnnnnnnnnnnnnnnnnnnnnnnnnnnnnnnnnnnnnnnnnnnnnnnnnnnnnnnnnnnnnnnnnnnnnnnnnnnnnnnnnnnnnnnnnnnnnnnnnnnnnnnnnnnnnnnnnnnnnnnnnnnnnnnnnnnnnnnnnnnnnnnnnnnnnnnnnnnnnnnnnnnnnnnnnnnnnnnnnnnnnnnnnnnnnnnnnnnnnnnnnnnnnnnnnnnnnnnnnnnnnnnnnnnnnnnnnnnnnnnnnnnnnnnnnnnnnnnnnnnnnnnnnnnnnnnnnnnnnnnnnnnnnnnnnnnnnnnnnnnnnnnnnnnnnnnnnnnnnnnnnnnnnnnnnnnnnnnnnnnnnnnnnnnnnnnnnnnnnnnnnnnnnnnnnnnnnnnnnnnnnnnnnnnnnnnnnnnnnnnnnnnnnnnnnnnnnnnnnnnnnnnnnnnnnnnnnnnnnnnnnnnnnnnnnnnnnnnnnnnnnnnnnnnnnnnnnnnnnnnnnnnnnnnnnnnnnnnnnnnnnnnnnnnnnnnnnnnnnnnnnnnnnnnnnnnnnnnnnnnnnnnnnnnnnnnnnnnnnnnnnnnnnnnnnnnnnnnnnnnnnnnnnnnnnnnnnnnnnnnnnnnnnnnnnnnnnnnnnnnnnnnnnnnnnnnnnnnnnnnnnnnnnnnnnnnnnnnnnnnnnnnnnnnnnnnnnnnnnnnnnnnnnnnnnnnnnnnnnnnnnnnnnnnnnnnnnnnnnnnnnnnnnnnnnnnnnnnnnnnnnnnnnnnnnnnnnnnnnnnnnnnnnnnnnnnnnnnnnnnnnnnnnnnnnnnnnnnnnnnnnnnnnnnnnnnnnnnnnnnnnnnnnnnnnnnnnnnnnnnnnnnnnnnnnnnnnnnnnnnnnnnnnnnnnnnnnnnnnnnnnnnnnnnnnnnnnnnnnnnnnnnnnnnnnnnnnnnnnnnnnnnnnnnnnnnnnnnnnnnnnnnnnnnnnnnnnnnnnnnnnnnnnnnnnnnnnnnnnnnnnnnnnnnnnnnnnnnnnnnnnnnnnnnnnnnnnnnnnnnnnnnnnnnnnnnnnnnnnnnnnnnnnnnnnnnnnnnnnnnnnnnnnnnnnnnnnnnnnnnnnnnnnnnnnnnnnnnnnnnnnnnnnnnnnnnnnnnnnnnnnnnnnnnnnnnnnnnnnnnnnnnnnnnnnnnnnnnnnnnnnnnnnnnnnnnnnnnnnnnnnnnnnnnnnnnnnnnnnnnnnnnnnnnnnnnnnnnnnnnnnnnnnnnnnnnnnnnnnnnnnnnnnnnnnnnnnnnnnnnnnnnnnnnnnnnnnnnnnnnnnnnnnnnnnnnnnnnnnnnnnnnnnnnnnnnnnnnnnnnnnnnnnnnnnnnnnnnnnnnnnnnnnnnnnnnnnnnnnnnnnnnnnnnnnnnnnnnnnnnnnnnnnnnnnnnnnnnnnnnnnnnnnnnnnnnnnnnnnnnnnnnnnnnnnnnnnnnnnnnnnnnnnnnnnnnnnnnnnnnnnnnnnnnnnnnnnnnnnnnnnnnnnnnnnnnnnnnnnnnnnnnnnnnnnnnnnnnnnnnnnnnnnnnnnnnnnnnnnnnnnnnnnnnnnnnnnnnnnnnnnnnnnnnnnnnnnnnnnnnnnnnnnnnnnnnnnnnnnnnnnnnnnnnnnnnnnnnnnnnnnnnnnnnnnnnnnnnnnnnnnnnnnnnnnnnnaaatggtagggcccgcgtcgttttccacctgcctcgacctccagacaggcgagggtgacttggtggcgcctacgccgttgcagaaatgatcgcgcgctgagcggccgagagtgcaaaaattactggcttgaaactggtgtatccctcaacaagtcaagccctgtcaatctgaagacacaattgtgattggctaatactatcctgtatcccatacgtgggtgtatccctctacaaaacaaattcggtaaccagctcctggggttaacgttggacaagcactgccgaatggccaggttgctctctaccttgagctcagcttcgcacggggacaagggacattggtcacagtggatgagtccaaaaatgtaatggctcgctaacaacgaactgtaatgtatagtgtacattatgctttgcgcgtgccatgcaaatcttgctgccgtcgtagctgtacagtacgtaatggtcttgcgagcgttgcaatggacgactgcacattcccactcaaaatacgcaaagcggttacccgccaggtggtgggcattgacttggttcgagcggatgtctgcccttggccagcaatgacacagcaatgggccgctgcagtgtacatgtatgcagcagtgttttgtgtgagagcgacatcaatatacatgtacattctcccaatcgtagccaatatgatgcacacttgggaggtgatatcgacagcggggccacgttaaattcctatattagccgtacaaaaaccaaaaacgggctgctggtacagaagtacgagtgatacagtagagtagcgaggacaggagaaagcgcttcgcttgcttgatgcaacaaagctgtgcagcatcgacggaatttctcggtggggtcgactagcgttcgccttgtttttccattgattcggaactgggattggcacgacacgcttttcggagttagagtgccgatgtgcacactgtacacatgcgataaccggaaattgagtccaaaaatgtagtagtaagtgactttatttggtcttggccattaaaatcctggtggtggtcttactgtttcttcttcttctactgaacttcgatctcaagttggggtggtggcggcgaacaagctaataagttgggctgtgtcggcagccgcattggtgagattcggctttgagagacttgaggtagagtgctcagtttagtaattttgataaatacatctgggcgtctggtggatgagatcgtgggctcgagcgacgaaagtgatggcagcagaatggagattgaagacgctggcgtagagatggagatggtcagaggcattggggacggtggcatcattgagaaggctgaggctgtggtcatcgcttcctccgagcacgagtggcaagacgaggactttgaagatggaacttgtctcttgtcagactgcaccaacacggctcaagcgaacggcttctgctacgctcacggcggatatcaggtgtgctatgctcttggttgtaaccggagggctgctgtacgagcttttcatcgcaaacgcgccgtatccagcgacacgaatgatctgcacactgctgaatacgacggtaatggaaagagcgcgaagaaccaaaaggtgtgggtccaactcgactactgcgataagcacttggatgaagaggaactggatggagatcacgcagccgaagcatcgagtcaagcgcagccgcatgagaccatccgcgctaccgatcgtcgttatcgtcgccacagcgtgtgcaagtggcttgggtgtatgaagtgggtgatgagagatggagacccgagcgagtactgcgtccttcaccgagcccaagacggcagctcagtgatctcgagaggaagtagcgtggcatcattcacccactccgaggacgagtcgagtgttgagcaagtggaggccacggaattcaatggcgaaaaggacgtccagcgcgactacaaaagccccgtcctctgcaaagaaccaggatgcagcaagcagggatctgtctacggagacaagaggggctactgcttttaacacggcggtggcgtcacctgcatcgtaccaggatgccccaagcagcgtcaattgaaggggctatgccgagagcaagctttgcgtttgttcctgccgccgacagaagcacccccaccaccactcttcccccttgatacttttctgtaggtagacccggaaagaacgtatcttcagcgaaacaaacattgcagtgtagtctcaggtgctcgaccatagccttcttcattgcagcagtgtaaaatggtagggcccgcgtcgttttccacctgcctcgacctccagacaggcgagggtgacttggtggcgcccacgccgttgcagaaatgatcgcgcgctgagcggccgagagtgcaaaaattactggcttgaaactggtgtatccctcaacaagtcaagccctgtcaatctgaagacacaattgtgattggctaatactatcctgtatcccatacgtgggtgtatccctctacaaaacaaattcggtaaccagctcctggggttaacgttggacaagcactgccgaatggccaggttgctctctaccttgagctcagcttcgcacggggacaagggacattggtcacagtggatgagtccaaaaatgtaatggctcgctaacaacgaactgtaatgtatagtgtacattatgctttgcgcgtgccatgcaaatcttgctgccgtcgtagctgtacagtacgtaatggtcttgcgagcgttgcaatggacgactgcacattcccactcaaaatacgcaaagcggttacccgccaggtggtgggcattgacttggttcgagcggatgtctgcccttggccagcaatgacacagcaatgggccgctgcagtgtacatgtatgcagcagtgttttgtgtgagagcgacatcaatatacatgtacattctcccaatcgtagccaatatgatgcacacttgggaggtgatatcgacagcggggccacgttaaattcctatattagccgtacaaaaaccaaaaacgggctgctggtacagaagtacgagtgatacagtagagtagcgaggacaggagaaagcgcttcgcttgcttgatgcaacaaagctgtgcagcatcgacggaatttctcggtggggtcgactagcgttcgccttgtttttccattgattcggaactgggattggcacgacacgcttttcggagttagagtgccgatgtgcacactgtacacatgcgataaccggaaattgagtccaaaaatgtagtagtaagtgactttatttggtcttggccattaaaatcctggtggtggtcttactgtttcttcttcttctactgaacttcgatctcaagttggggtggtggcggcgaacaagctaataagttgggctgtgtcggcagccgcattggtgagattcggctttgagagacttgaggtagagtgctcagtttagtaattttgataaatacatctgggcgtctggtggatgagatcgtgggctcgagcgacgaaagtgatggcagcagaatggagattgaagacgctggcgtagagatggagatggtcagaggcattggggacggtggcatcattgagaaggctgaggctgtggtcatcgcttcctccgagcacgagtggcaagacgaggactttgaagatggaacttgtctcttgtcagactgcaccaacacggctcaagcgaacggcttctgctacgctcacggcggatatcaggtgtgctatgctcttggttgtaaccggagggctgctgtacgagcttttcatcgcaaacgcgccgtatccagcgacacgaatgatctgcacactgctgaatacgacggtaatggaaagagcgcgaagaaccaaaaggtgtgggtccaactcgactactgcgataagcacttggatgaagaggaactggatggagatcacgcagccgaagcatcgagtcaagcgcagccgcatgagaccatccgcgctaccgatcgtcgttatcgtcgccacagcgtgtgcaagtggcttgggtgtatgaagtgggtgatgagagatggagacccgagcgagtactgcgtccttcaccgagcccaagacggcagctcagtgatctcgagaggaagtagcgtggcatcattcacccactccgaggacgagtcgagtgttgagcaagtggaggccacggaattcaatggcgaaaaggacgtccagcgcgactacaaaagccccgtcctctgcaaagaaccaggatgcagcaagcagggatctgtctacggagacaagaggggctactgcttttaacacggcggtggcgtcacctgcatcgtaccaggatgccccaagcagcgtcaattgaaggggctatgccgagagcaagctttgcgtttgttcctgccgccgacagaagcacccccaccaccactcttcccccttgatacttttctgtaggtagacccggaaagaacgtatcttcagcgaaacaaacattgcagtgtagtctcaggtgctcgaccatagccttcttcattgcagcagtgtaaaatggtagggcccgcgtcgttttccacctgcctcgacctccagacaggcgagggtgacttggtggcgcccacgccgttgcagaaatgatcgcgcgctgagcggccgagagtgcaaaaattactggcttgaaactggtgtatccctcaacaagtcaagccctgtcaatctgaagacacaattgtgattggctaatactatcctgtatcccatacgtgggtgtatccctctacaaaacaaattcggtaaccagctcctggggttaacgttggacaagcactgccgaatggccaggttgctctctaccttgagctcagcttcgcacggggacaagggacattggtcacagtggatgagtccaaaaatgtaatggctcgctaacaacgaactgtaatgtatagtgtacattatgctttgcgcgtgccatgcaaatcttgctgccgtcgtagctgtacagtacgtaatggtcttgcgagcgttgcaatggacgactgcacattcccactcaaaatacgcagagcggttacccgccaggtggtgggcattgacttggttcgagcggatgtctgcccttggccagcaatgacacagcaatgggccgctgcagtgtacatgtatgcagcagtgttttgtgtgagagcgacatcaatatacatgtacattctcccaatcgtagccaatatgatgcacacttgggaggtgatatcgacagcggggccacgttaaattcctatattagccgtacaaaaaccaaaaacgggctgctggtacagaagtacgagtgatacagtagagtagcgaggacaggagaaagcgcttcgcttgcttgatgcaacaaagctgtgcagcatcgacggaatttctcggtggggtcgactagcgttcgccttgtttttccattgatccgctgtggggatacgctacagatgtagcttgaatgtcgttcgatgacatccaaaaaccttccccaatcgacagttctttgaactgcgaattaaatgttcctgtgatggtttcagatcgtttgggcatggtcgaatctctgatggagagtatgctggccgaactttggagttggcaaccgaaagatgcaaatttgacgtggcgaggaagcgaacaggctgtattggcagtactacgtggtcgatcgtcagattgcacgattaatccactacaatggagcgctatcatccatggatctaaagcggtggaggacgccaagaggctgttcgagacattcaacaatcaggtggccatctataacatttgataaaatggttcagcactcaaatatcaggggttctggaagaacaagagaagaagtaccttagcacgacacggtgtataaatctaggtattcggacgagactttggtgacaatccacgacagtcgtcaagtgaagagaattaggattcgcgtggtaaggcggcagcattctatcggaccgaaacgaaggctgtgtcatgaacctcgcggcaggaaatgaacatttgacaaaatggttcagcactcatgaatgcacgcctgaggacatttagacaaaatggttcagcactcatgaatgcacgcctgaggacatttagatattaccaagtgattaccattgaaccgaagggtggccctggactgtgctgcgggcagcttcaagctctcaagtggctgtatctagatcgaaacgagggcggtatggtaagaaaaaaaaggcatctagctatagtcaagtgggcgtcgctgccagcaagggccacctggaagtcgtcaaatgactccatgaaaaccaaaccgagggaccgcaatggatggcgctgtctttaaatgcaagctcgacgtcatcaagtgactacacaagagtcgtttggaaagctgcaccactatagcaaaaccttcacggtcctgcagtgattataagcaattcgggtcaagagatgcacgagtcgtgcagcacgactcaagcgctagatcgcgcggctgtggacggagatttcggccgagtgctgttctttaaaactcaaaaagcaagagcgacgaaaagcccttttttcatcggcataccaggttctgcctttcacgactggctcaccgaacactaccccgatctgctggaatccttactcgtgccctatgctgttcagttcgtacatcgccgatgccgtaaaatgaacttgccagtgcgatgtcaaaccaacaacgtcattagccggtgaacccacccccttcttcctcctttaacaaagtgtgtgtgtggtaaaggcggcgaatgccgggtgacgacgtccattctgttcgaatgggtgagaaggcaattgggaattgacggtgcagcaactatcttcttgaagacgacgacgtgacgatctcgaagcgaaagtatcttttcctcgaggggcagaagcaccgcgagtttcgcgcaacaaaaaagcttggcccactcacagcgtccatctattagtcgttggaattctcttagcggtgaaagttcgagcgggcagagcctgcagcaggcgatgtcggggggcacaatgccccctggtacacatcgatgattaccatccaggctgacgtcgatgttaaacgtgctgaacaagcgacgataccttgaagttgtgatgcaccggacaggacgcaccgaagtcctctacatcaagatgcggttcatgttttgccgtacgcacgcttcggatcaactaacagccacgccacagcagcgacttctacgtggctgggctgcagacccgcgtgaaaattgtgtcaagcgttggtggcgccttgcgaacgcgacagctgatggacgcgcttccggctcagatgctggacacaataagcgtctgtatactggagttcatcgcggactcgtatctcggcaaaggcgctacacagcgataggcgagcatgactcacgagatgctcccaaggcaaaggcgagctcccatgctctctcggtgcagcacctatcgacgataggaagcaagacccccgccatgtggagccatcgctggcattacgccacgttcgactctgaggttcgcctcgtttctgaagctctgcgagtcatctccggatgggagccacgcccgatctgtctgttgggtgttcatctccgtgtgcctccgaacggatgcgcggatactcttgctgctcgaacggggcgtcaaacgagcgcctgtgcacggcacagcataccgccggccgcgctggttcaggatcttgtcgccgccctcagttcctcacttttcaatttactttgcttccaacaagcatcgttctccacccccagcaattgctacctacactccctgtcactcgacgacactccatcgacaatgaacctcaccaagttggctgcgtacctggctgtcgtgtccctcgccgtcggctccttcgcggatgcctctgtccccacgaccggctacgctgttcgtcggctaggagctggcggcggcgtttcgacctcgacgaccggagtcgccgctgacactgcgacgcagcagacgaccacgacgacagacactgcaacgcagcagcagcaacagcaatctacccaaggcggccagacctcgacccagggcggccagacctcgacagactctggaaaccaaggaggacagtcatggaaccagggcggccagcacggaggagactccaaccagggaggccaaggccaaggcaatcaaggtagcggccacaactggggccagggcaaccagggcggtgacgctgcaactaccccatgtccgagcgacgatgccaaccagggcggccaaggccagtggaaccagggccacaactggggtcagggcggccaaaaccagtggaaccagggcagcggtcacaactggggccagggcggccagggcaaccagggtggacaaacgtggactggaacccagggaggcgacgctgctactacgccgtgtccgggcgacgacgctaaccagggcggccaaggccaatggaaccagggcagcggccacagctggggacagggtggccagggtaaccaaggctggggtcaaggtggccagggcaaccagggcggacagacttggaccggaaaccagggaggtgatgctgctgctacgccgtgcccaagcgacgacgcgaaccaagctggccaaggccagtggaaccagggccacaactggggtcagggcggccaaaaccagtggaaccagggcagcggtcacaactggggccagggcggccagggcaaccagggtggacaaacgtggactggaacccagggaggcgacgctgctactacgccgtgtccgggcgacgacgctaaccagggcggccaaggccaatggaaccagggcagcggccacagctggggacagggtggccagggtaaccaaggctggggtcaaggtggccagggcaaccagggcggacagacttggaccggaaaccagggaggtgatgctgctgctacgccgtgcccaagcgacgacgcgaaccaagctggccaaggccagtggaaccagggccacaactggggtcagggcggccaaaaccagtggaaccagggcagcggtcacaactggggccagggcggccagggcaaccagggtggacaaacgtggactggaacccagggaggcgacgctgctactacgccgtgtccgggcgacgacgctaaccagggcggccaaggccaatggaaccagggcagcggccacagctggggacagggtggccagggtaaccaaggctggggtcaaggtggccagggcaaccagggcggacagacttggaccggaaaccagggaggtgatgctgctgctacgccgtgcccaagcgacgacgcgaaccaagctggccaaggccagtggaaccagggccacaactggggtcagggcggccagggccagtggaccggtaaccagggaggcgactcggcggccgcgccatgctccggcgacagctcgaaccagggcggcgagggtcactcgtggggacagtggggccagggcgtcggaggaagccatgcaacgcagaacaacggtggcgacagcactaaccagtggactggaactgtgactacaccgaaccaaggctcggctggtggcgaccacactcctgtcacgcagggtggcgattcgagtgagacgccgtgcccgaacgaccagggctcggctgggtctcctcccgagaccccctctgttccggaaccccctgtgactgaagccccgtctaccgaggcccctgctaccaccgcgcccccggcgacgacggccccgccgacaacggatgcccccactacccaagcttctgcgaccaagaccggcgtcactcctgccgcccagtcggacgattcgaccacgcagcagtccgccgttcagtctcgccttcgtcactaggctccgcgctgatccaaagggccgatactttagctcgtcttcgtttggatgattcggttgaccagcatcgccgccaactgataccgtaaccttgcttgttgcccatgtttcaaaaatacaaagtctcgttaatacgtttggcgtagatttaaaagtaccggtgcggtttctaatgaacgttcgcacacaagatgagctggtcagcggactgcatggcgatatttcagtgtgcttcgagccagcttgcagtttccttcgcaaaaaagaaaacatggtccgccataatattggaacgacttgaggattgacatgaactaactgtcggtgccacttgtgtgccttaatgtaatcccgctcactgttttgctcataactttttattgggcaattagttttgagatgtaaacgcatatctgaagagagcgcaatctcttctgttagcagactgttttactgagctctacagtaaacgagagctcaattaggagttgctgactatttgcaaacccattcacggcaggaccagttatctgccgcattttatctgtggttttgtaagggggacaaatctctttttgctctcatgacagcaccgaaacaacctgtacaaaatgatttgcacccatttgaaatcgtataagaccggatatacgatatcacaatatggtacacaatattatgtgatttgtgtataaatatagtaagatttgtgctcagaggcagcgctgccaaagcttagtggtaaagtcctcggatcataaccgagaggacggtggttcgattccacctggcagcattaactcaaccaaaacactagtgggctaactgtcaattagagcattagggggctgccacagaactgcgaaagcgaccgacggctgccaccgagtgaacagattgaccgccagtatgctaagtaccatgagtcgggttccccttctgataacggtttgagatcgtcaaatctcaaaaaccggacatcacagcgggcccaggcatacagagggatatcgtatcactatagaaagtaggaaataaacaacaacaaaaatgaagacaatgtggtggaaaataccccagcaaaagcttttttctttggttatactaaactatcgcctcccacacaactttatcctgctggtttgcctcaccgtgcttcgacgcagactggaactgcagctgctccggcaccggagacggcaccctcttcatcttcgtcgccttcgtcgccagcggatgcttcttcgtcttggctgcctttttgggcttcttcatcggttgtgccatcgcttccagtgtttccttggtcaaaagacgaccggcgaccgttgctgtcttgtgcacccgcttcttggacggcggtagcacgagcacctccttctgcacgatatccttgatccggtgccacgctgccagcttcgtagatgcgggggtcctgttgcgccggaaattgtcgatgcacttgtccatacgcggcttggacggagggaataggccgcacccagcaaaccccgctttgacgttctcacccatcttgcatcctactcatgctgcgcttgccatccggatggcttccgcttcgtcgaccgaattgcgtccagtctcgccaacgtagatctcggttaggcggcgtagcttcgccttgaacgacgaaaacacagcgacatccagtggttgaagcagttgggtcgcgttcgaaggcagcaacaacagaagcacgccaagccgagctgcctctaagctgatctccacggagtaatgagacgaatacccatccagaatcaggagaagaggtcgctgcacgtccttgggcacgctagccgaaaaaaagcgcagccactcaagaaagacaaatccattcatgaacccgcagctcgaggtggtgacggcagctccgggtatggtgcagccatctagaacttcgagcttgactgtcaaccccggcagcacgaaaagcggcggcaccatgcaccccgacgcgctgccacacgcgaccagcgtgaggtgaaaattgagcgcaacgtcttggtgccaaacgttcttggaggctcgaaccgccacgacacgcttggagcccttgttggtctgaaacgctgtttcgtccatgttgaacacgcgagacgcgtccaaacgattctcgaccacagccttgatcaacgagctaaacaactgctcgagatcgctcttggtcacagcgttgcgggccttgcataccgcctgagacgttcgggttgccagcatcgggtgtcgccccatgaagcggcggtaccacccgccaccaaccgtttgaccagtggccatggagctcatggcgccggctttgaagatgatctccttgcgacttgcggggtgaccgaccagttggcacccgacaatccactcgaccaagcatgcctccgctggttgcgagagcagcggagccgggccatgacgaacaggtgcgcggaagatgcccattttcctcttcgcgacccatttcgtaaagttccgatacggaattggggtgctgtcgctgacactgcgggcgctgtcgtcggcgaggacgcgcttcactgcagaattgaggtcttcgatctcgtacgcgggcattgtcgaggtggtcgctgcggggttggtgggtggtttgtaggcttcaggaaataggagactgagctcaaacgggcgggaaatgtgtcttgttcgtatacagtttggcgagttttactggctggtagcgcttacagacttttttaccaatagggttctttaaaaatacttacggcattctaattggttgaagctaaaatggcacggaactggcagactgcacgcgactggcaccgtacctacaggtccaatccgttgaatccgagtgatttagtgaatgcgcagccgttctatcgatacagtaatctgcccgagtaaggaacgcctgatatatataaagacgcagaatatatcaattgatgttaagttgagtatacttttccaatgtactggtttagttatttcaaaatgaactgaagagcagctttacctacgagtccagaatgattccaacagtggcgtatggccgaagcactaacctttgaccaggcatcctcgtaccacaacagcgctgtcaaatgggtggagtgggggaggaggtgggcttgtggggcgaggtgcaaaagcaaaagtgcgagtctaccactacggtacatgtagtttgaagtctagtaagatcgctaaatgcgcgccatttttcaaacgagggtggagagctgatgattggcactggatttttcaccttagtacctcagtaccttgcagtatcttgctcatccccctatcgccacatcgactggaaaataatattaaatatgtgaggctattagttgtacacccgttccttattcgggcagaattctgtaataccttcgtcactaacccaaagggccgatactttagctcttcgcagactatgcatacaaattgtgtgtacacacttcaaaaaaatagccatgtttgagcaatggttcccaaaaacaaggcgacgcattttcttgcggctggcggccctcgtcagctcccgccacagctcctcagacgtcacttcagatagatcatggccggcagcaactcggacgcatcgacgcagcgcgtggccacgcaggtggcggtggcggccgccggcgccgcgctggcctactacgtcggctcgcgcagcaagagcgcgcggcgagcggcggccaagcggcgcgcccaggacgtggcccaggccaaggcggccgcgctgcccacagacctggagcgccgcaagctcacgtcggtggtggtgcgcgtgccggccacgacagccaacatgggcccgggcttcgacaccatcggcatggccctggacatctggacggagatctcggccgaggtcgtggaggacgcgagcgtggccccgggcatcacgctcacgaacgagggcgagggcgccaaggagctgcccacggacgcgtccaacctcgtgatcgtcggcatcaaggcggccttcaaggccgcgggcgagccgctgccccgccacctcaaggtgcactgcaagaaccgcatcccgttcgcgcgcggcctcggcagcagctcggccggcatcgtgggcggcatcatcgccggcctcgcgctggccggcatgcgcctgcccgtccgtggccgcgaggagctcctgcagctggtaagagagactctagtctgttgttcttgtatgagtcgtgactgacgctgtgcttgtgaccttttgcaggcttcggagatcgagggccacccggacaacgtggccccggccatctacggcggcctgcagctcggcatcttcgccgacgaccgctggtactcgtcgcgcgtgcagatcccggacggcctgcagtgcgtcgtgttcatcccagactcgacgggccccacgagcgtggcccgggccatcctgccgcccgacgtgccccgcaaggacgccgtgttcaacatcggccgggccgccatcttcgtcaacgccttccgatctggcaacctggacgagctgcgttacgccacgcaggacatgctgcaccagccgcagcgcggtgcggcccagtacccgcacctcgagccgctcatcaaggccgcgctgggcgccggcgcgcacggctgcttcctcagcggcgccggccccacggtgctggccatcaccagcggccgggccggtgacatcttcacgcagcagctggccgagcgccaggagaacaaggtggccaacgccatgcgcgaggcggccgccgccctcggcgtgtctggatgcgtgttcatcaccaacccggaccaccgcggcgccttcatcgtgcgggccgagccgcagttctcggaccgctccgtcgcgcgctacgagggcgacgtcgccgacctgtagagtgctgctagtttgaacttcggcaggccccacgtctgaatgctgtagtgcatggtaaaatggaacgttgatatgtttcgcccccgattgctcgctctacccccatgatcctttcatttggccagtatgtggcagtgtgcaaggtgctgttcacaccgtatcaccgcaagggaaactaggaaatgaacaacactttttcactttcggtgctcgaaggaggggcacacgtagcgccactgctcgtcgtgaagctaattttccaggccaagacccagttcgcgtaccttccccatgtcatcgactccgtttcttgctttttggactcgtcagtggatctagggcgtgtaaattcgggtcgacccgccttctggagcgcatttggagcagcagcgaagtctacgccactgatgataatggttcagattgtgcccccagtggttcctggactcggaggaacttcatccgaacagaccgccattatcggacggaccagtttaattcgtccctagcggaggctgtgcagctcaaaaagctggaaatggtcagcgaagctccaagactgcgagattacggccattccagtcgaagatttagccaagctggggtggatggaggggctactattttttcgggacaatggcagcggattaattagcggtcgaaccagagagggaagactgggccaacgcattgagtgggattgggtgatgcgatcagcagcttctggtggccacagtgatattgtgtggtggttgtatgaaaacctcccgcatgtaagacactacctcctcaacaaagcggttttgaacggggaccttgaattggcagaggggcttacttcccacggagctcgattttgtcgttattttccagactacctggtgaagcaagttgctgcgaacgggagactgcaggtgtttctgtggctatttgaacaaggtaaaaatcggtgactttgaaggcttattggaggctgctgcggggaacgggcatctagatcttgtgcgctggctggtcggccaaaaacactcgacccgatgaagcaactagatttgggcattccgttgaaaagatgaggctggctattcatgctgtcgctgccaatggatatctacaggttgtagaattcctatgcgcacaggtagggttcaagcactttaccaggggtatgctggttgacgctgcgaagaatggccaccaaagtgtcgtcaagtggatgtgccaaaatgcttcaaaccagaatttgatttaccaagatggaaaacaacattcgaagacgatcacagcgatggaggcggccgcttctgctgggcatctaacaattgccaagtatttgcatgcactcgataagttttattcgtccagaaagaggaggaggggcgaggtcataccgcgagtacgaccaatttgtactaatggagcggccgcgaatggccacctagaagtcgtcaaatggctacacgaacaccgactcgagggctgcagtggccgcgcgatggatggtgcagcttcagcgggccatctaaatgtcatgcaattgctgttcaaacactgtttcgaaggatgctcgatagctgcaatactgtgcagtggctgcatagcaatacaagcgctgggtgttcgacaagagcgatgggcgatgttgtaaagtggctacatgaataccgaacggagccttagatggctacacaaaaatcggtcggaacgttgcacggctcaagcgatgattgaagcggcgaagcaaggtcgtctgcaaatcgtggaatggctttacaggcatcgattggagcacgatctaactgcagctttggagcagactgatacgatcgacgtgttcctccttctgcatgatcgatgtgatgtaaagtgtaccgagagtgcagctataagagcggatgaggaaggcccaccggagatgaatgactggatccttgagcactacccggcttttcgagaggtggttgaagaatacgaatgagaatggaattcggagggtaaacaactcgtctttggtaaaaatgttagattcttgagattatgcaccgaagaaacaccaatcgaagctgcagtgtgatccagttgcgcaggcactgtatgaactttgaattcttcaagaagaaccgcgaaaaagagcaacggcaaacggcgcatcaatacacgcaatcagcgccagcaccgctccgattatgagtgccccggctgcagctccagttccaatagcggtaagttgtttcagccttgctacgagccccacccgcattttagccacctctttaccggagaaagccacgccattcttctgcatcgtcttggacagttgaatcatatccggctgcttcgccagtcgcttcatgctccccgggttacttacgaagcttcgaaggatcttggggtccttctccgccgcagtcctcagcttgcttagactcgagctgcgctgcgctgcagtgccgtgaccacctccgagttattctgcagaccctcgatcttggagctgagccctggggacttcttgaataggttggtcacgctctggatccctagggaaacttcatcctctcctcttcttcatcatccgttgattcttcatcagtggcggcgatttcgtcgacgagaaagcggtgagcgctattcatcgtcgcaacggagctattgtgcgcgaccgaagcatcgatgagcattccaatggtggcgataaccaggagggccgccagaatcggtagccgcattgtcttgggaaggatgtgatgaaggtttagtctgcgccctcgaggcgtgatcggaaagtgaactgacctttggataacagccatctaccgttgatgagcaggagttggtagtagttgcaacgaaccggcttcgaatccggctgtgtgcacacaagacagctatcgtgcactttgtcgagtggattgcgtgaaaatgtctgatcgtctgagctgtaagttttgaggatgctgtacccgcaatctgaaatgtatacgagtgcaacgtccagtatgacgaatggtgaagaatgaggaagtgtttgtttaaagccaaatttgccacaaagaggaagcgggttaattagagaatgagcggtgggagcggcgcgcctcctactatttcccagttttttaatcgagcgataaaacgcctatgcaactacatgtacttcaaaactaaactgcgtcccatcgtgatgtctttctcacgccaccaatgccacacgcgcaatcgactatgagcagttctcgtgctatcacgcaatacaggatgagcgatatcgagtactagtactgtacataattgctactaggcgataccagcgtgtaaaacgttttcctaggcatttaggcggtttgctgggtggagctcaagtctgaattttaccgctctcgatgaaaaatagaaaatctaccgagcaccactcagaacaaatcacagaagaatcgcattcttaataacactttcaagttgtggggtagcattctgaacctgttatcaagacataagaattcagttccaagtaacttgctcagaggattgcaggggttaatgcagtgatgaggcaagtgtacatttggcgggtcttaggcgcgaaaatctgttgcgtatgcgagcaagtcttgtgctcccagtactctgtaaataaaaattgcgattatcaattgtaaagtttatcgaggctacccgtctctccttcacaggacgattcgcgaatgagctctcacgcaatacaggcctttcacaggattatttaaaaaaacacgtactcccgcgaaatccaggtcagcagtgtcaaccaagagtaccgtgcctgctgtagcctttggtactgtatcggggtcccactcggatcattttacgttttgctctccagcagccaagtacccaagcactacgacaaacctctatgcgtcaggcaatcatcgccatcttcgcgaccgtgcttctggctgccagcaatgctgtctcagctcagctccccaaagcggagtcagtcgatacatccgttcattctcgctcgaccattggtgttcaaaccgacatcgtcgccaagcgatccctgaggaccatcgaccctctggacgacagtgatgatgacgattacaaggatcattaaatgtgtacccatcgtttccggcactctgacccctcacctttcgaagtcgtagagaccgatatctctcccttcatcccgaccgatctcgctatcgtattggaggccgaagcacagaccattgtcacgtcgatgacgaccaagtctagtctgtgaagcttcacgatcgtgaatatcagaagcaagcaaaactgttctggtgtgaaagctatactgccgggtcgagtttagcattatttgacagatcgagggacttacttcgcaaggagtaagttcctgttcagcaacaaaataaagagtattatgtatttcgtagtgctgcactatggagcgaaagcatgcgggcggggggcattttttttaattaccgctgcaaattcttccgtaagctgaaggcgacgtaatgatttggtaatgtctgtgttgtacatgttttcctgctgtctgcatagtagcgggtactagtaagcaactttgggctgagtctcgacacaatgctattctgatactattcggatacttcagtcgtctctcttcaagtttcactaactacatctagtcatacacctccgtcactgactcatttgagtgtggagaagcagaggagccatcgtacggcttgacccccgttgcctggtctcgcgcggcctgctgggcgctactattcgtcgccatactgatgcacggcgggcaaaaggccattttgcgctgaaccaactgatcctccatcgaaatatagctcactcgtttgcgaatcttgcacgaggagcacactcgcccgctgcagagtttacagacactcggtccaaatccacggatcttcttggaggatattttcccgcagatcacgcactccttcttctcctggagactctttttgtccggcttgaaggacgatactttctgctgcagcagccgcgacaacttcttcatctggccacaatacgcgaaatcggtcgcagtgagcatggctctggctgaaatcgggacgaagagtagccgcatcgccttgcctccagggtccacgacacaggaagtaaaattgtcgatgacgttcgtctcaatctgccggaagaagctgaaaaccgacaaattgccgcggatcatgctcgactgaggggtggtcagcgggaattcgatggagtggagcacgttgtagccgattcgctctccgttagcgaggttcaggtagcccgtggcctcgacatacacaaagtcgcgaggcttgatgagactcttgggctgcatgggcatctcaagcttcacccacttgaccccgatcgaccggaacgggtcctcttccgtcgggtccactatcgggcacaacattgccccgttgtcgacctcgccgatgtacgacgttcggatggccatggcctcatgggtcggggtcacgaggccgaacatgaggtcgtccagctcgccgacgagcgttccaacgctcagcatcactgcgaggtctttttcaacgtcgtcctccccgctcttgctcttgcgccggtggttcttatggatacgctccgtgtagacgtgcaggttgtctttggacttgacgtgctcccagtgctgctcatcgacctggcgcttgtcgacgacgacgaactcttcgtacttcttgaaatggtcctcgatgaagccgctcacgaggtcgatcaggtgctgccgctccttctcggacacgcggacgttcggatacgggtttcgggtttttatcctttctcccgacatggtgggggtcgtcttgctttggctgaggaaaacggcaagtgaaccatattcggagtcgtcggtggggttcaccccggtgccagcctatcaatctccaatcgtttgatcggctgggacagcaccgcggtgcaatgcgtcgcgacggaagaacacgacagaagagcttacttggattgtgaaggcttcaagtcgagtgtggcgtcgtaacgaagcggaggcacgcgagctgctttttgcgaacaagagttcaggtaagtgatgtatcgaaaactgcgcacgaaagagagacaggcgacgagatagagccgagttgcaggcaagcgtggcgaattcttggctggttttagtgcgaagaacctcgcgctttagtacatgatacttcgcgttgctcatccgcagcatttgtttcccgaggttcgcgatcctcaagaaaatgatcggtcaccctcttggaagccgagttggtcggccaccggccggccagctcactactgtacgctggcagattccacaatcgcaccaaaagtggtggcttgcctgtccacaagtgtcttttgttgtgtgtgggttcaactagtacacgcaaaaagcctagcgtacggcgggatggataggtgtaaacgcttaatggtctatccaaagttaccaactggtcatcactttggtcgcctgtgtgtgcttttgctaacgcgcttttttgcttctcagctcacatactaaggtcttctgtcagtttcgtgccgtccttcgaacttgcggacttgctgtggcataacttttcattgaattgtccatgattgcacccgctaaatctgcgcgattgggctgaatttatgtacttcacgctggtccgtgtaaactttgcaaaacttcttgttattgttttgaaaagcttgttggtttggagtgagctgccagtttcctgcctctttttgatagcatttttatatgctatgcaaatccttggaggctcatcaccggaaattgcatgtgacgctggaaaaatctaccaatagactacgagagtttaacaaggagaagatgctaattggctaaaacaagtaggcacggaactggttgtacacgcaactggcaccttaccttaaaagaggttgtaacgcgttctgatgctgacttagcagtacatgcattacgtcggaaatgatttaactcgcagcgaatacgagggaaccgatgccgagaacgatgaaatcgaccgacaccaactctgtcttcgacccgcaaaatgcagcggtaagtatttatattctcgatccaagattggggacagcagttgctacttcgactcaatatattcaaacactttatccacttttaaagtatgccagctgtggttgttatcgcaattatattcctcaatatacgaaatgcctcgaagggaggaaacgaggcacatcgtatgactgtatgtcccaacacctcgcctccgattcgtactgcgactatgtaacagcacattggtcatgtagcgagagcttgaatgttccggtgcaacgacgtcatctcggcatcttgtgacgtcttcaacgaacaaattatagcctcgagtacgtcgctgggctagatctggacaactccgagctgctggcgacgtagccacggggtttagtttgcaccatggtccatacaaccccagcgcctaagcgtagtaacacgtaggcctaagcctttgaccacaaactgcattgcatttatactcatcctgctatgctccacagttcctcactaactaactatcacatcggctaggtcaactcctcgtacgaagacgccgatgtgtccacgaaggaatacgccgagtgcatcgtgccatactcgtagcccagtgcgtgatcgatcgcggcctcctgcgcgttccagcggttcgtctcgatcatgcatttcccacagaccaccaccttgcgctgaatcaattgtcccccacgggcgatgctgctgacgcgctggcggatcttgcacgagtagcagacgctaccgtcgcagatcttgcacgtgcccttgccgatgcttccgatggcattggtggtcttcttgccacagactacacactgcttcctctgcgtgtggtccttccggacaatcggcgagtgactcgagcgattgagctgcagcatccacgcgagcttcttcatctgtccgcagtacacatagttcgtcgcagtgagcagcgtccccgccgccacagagactgcgaggctgcgcatgatctcgcctccagggtccacgacgccccacgcgaagttctcgataacctgtcgacgcttgcgtctgaaacaactgaacaccgacatgttgccgcgggtcttgttgggcagcggcttggtctgcgggaagtcgatggagtgctgcaggtggtagcccacccggtccccattgggaaggtacgtcatgcccgttgcctcgatgtacacgaagtcgcggctcttgatgagactcgagggcagcggcacgtcgatggtcatccacttgatgacgagcgagcggaacgggtcgtccttggtgggctccagcacggagcagaccacggcggcgctctcgacgtcgtgcacgtacgacgccttgacgcgcatgtcgtccagcgtggggctcacgacgccgaacatgaggtcgtccagctcgccgacgaacgagccggcgctcatgaccacgggcagctccttggtcacggccttggcttgcactcgctgggtggcgctcaacgacgtctcgggctgcatcccgcggcgactgagctccttgcgggtgcgctccgagtacacgcgcagcttgtccttggccttgacgagctcccagcgccggtcgtccacttggcgtcggtcgacttgcgcgaactcctcgaacttgtggacgtagtcgaacaccaagttttccacgaggtcgaccagctcgagtcgctcgatgtccgacacccgaacctccgggaacgggctgcgcgtgaagcggtccttcggcatcgatcgagggcggtgaaatcaacaactgagaccctgtcggaacagtacggtatcctatggggtgtgatgccacccgccacgatgtgtttgtgcctaagcagcgaccgatttacacacagcagctgtggacgtgccgcatcgtaaacgctgcgagctgtcacccaggcaagtgcacagacaagggaggggtcttattctaccttcaacttctacagaccctaccgacaagagtggctttgcgaaggttttacatgtactgtacacttacgacccgcggaaagctgtacagtatcgaatcttcctgtcataccagtctgtccatacaaagtggtgcactgggatagtcgagagtggcgttggagctgagctccgaggcaaatgagcacgtcgccaagcctgtctaagcttacctagactctacgtggacttcttaccagcattgccgccctgcaaagacactacgaacgttacgctctaaaacctttgtcgtatcgtaaatgccgtcagttgtgccccatatggagctggggagctcgatttgtgactctcgacgcgactctcgggtcgagtccctcgcgctgcagcttgagtcaagccttggcagtccgtgacctcctccggactcatcatgatggtgcggtgcgcgtgtcgatgcctttgcagttgtacatatatagactatatatgtatagttaacattttctccggccttcaagtggcggcccaatacttgctcaaaatgaaacactttgacgagtgtggcaaagccaacgagcttgccggcgaagattgtgccgagtgcgatctgtgttcaatctcacccactcgagcctccactctgtacgtgtacacgagtgcaaagctgtggttacctgtttgtggtcacttggcgttcatgcagccccagcgctgtgtatcttgacgataactacagtacatgtatagaaccatgcacactgtacgaagaacccaatctgaagctaaacagcgaatgttttcgaccagcttgcgcctgacactacagcaattacagcactaatacgggttgcggaactcagacagctccccaactaataactcactcactcacaaccaaactagacctaaatatcctgccagttttcatactcctcaagcaccgacgcggaggattccaagaacgacatctcgcaggagactgtacatgccacgtagctgcagccgtcgtcgctcttgcaggcctcgtagaccgacagttggtcccttgcgatctcctccgcgttccactgagtggcctcgcccatgcacttggcacagaccaccaccttgcgctgaatcaacttgccccccaccacgatgaagctgatgttctggcggatcttgcacgagtagcacacgctgccgtagcagattttgcacgagctcctgccaatgctgccgatgacactggagaacttcttggcgcagacgacgcagtgcttcctgctctcggccttcttggccgggtaatctacggacgcgtgttgctgctgcagcagccacgccagcttcttcatctgcccgcagtacacgtagttggtcacgcagaacatggctccagccgccacgttcaccaagaggctgcgcatgatgtggcctccggggtccaccgtggcgcacgcgaagttgtcgatcacattgcggtcgagctgtcgatagcacgcgaacagcgacaagttggcgcggatcttgttgggcagcggcttggtctgcgggaagtcgatggagtgcatcaagtggtagccgacccgctcgccgtcctcgaggtaaactgtgcccgtggcctcgatgtagacgatgtcgcggctctttacaaagctggtggcctggaacggcatgtcgttcgacatccacttgatcaccagcgagcggtacgggtccgtcttgctgggtgtgatgacggaacagagcacggctgcgttgtcgagatcgtgcacgtaagaagctttgaggcgcatgtcgtcgagtgtggggttcacaacaccgtacatgaggtcgtccatctcgcccacgagcgtgccgacgctcagcatcacaggaaggtccttcgctgctgcggcttctccttttagtcgctgcgttgcactgagggagttgtcgggctcgatgcccatgcgcttgagctccttccgcgttcgctccgtgtaaacgtggatgttgtctttggacttgatgtggtcccagcgccgcttgtccactttgcgcttgccgacctccacgaactcctcgtacttcttgacgtagtcgtccacgtatccgtccacgagtttgatcagctcctggcgttcggcatcggatacatgtacgtccgggaacgggttgtcgttgaatcggtccttcatagtgttgcttgaggtcgtactctctgtagagtaaattcacaactgcgggcttgacgtgaggcaggcttaggctagtgggtggactggactggattgatcgaggggggactggaagcagtcgttttgcgtggactgccatctgacaaagttgaatacgccaccgcttgaggctcacccagctgcagcaaccccgtggtaaactttgatggcaagatcgatacaagtgagcggctccagggtcttatctccgcagcaaccagtgggctcaatttggactgtacgggtcataagaccgaagagctcagccaacttgattacccggataatcaagaggtcttcagtgaccccacaacgggagccggatgctgcgtacgtcacttgcattgagcgtttgttccacttgtgcgcttgtcttctcgttgcagctagcctttgtgcctcagggctcgagccaaagtttctggtatctcgccagaaacgacgcggtctgaccaccagcgcacggagcgtcaactagtgtgactaaaccttatcgtgctggagctggtaggcatacgtcttgagcctccgagcggcaggcccttttgtcatatggaccatcatctttgacagagagcttattttgaagtccgaccttaggtagagggttctcctttatggtagttggaacggcctagatacagcacgatgtgctacatgaactggtgagaaccactagcttgtcggggtcgtcgcacgaaatgcagtccccacacaaacttgtcaactattattccacgtgtagttgggtggcattcaagagaacttgttggacgaatagctttggctacaaagagatggcatgtgcacggattggaggcagtcgctaacctccggacagcagagaccgtagccccgtaatcgttggtggcagagtttctcgttccccccataccaagatgacggccttgaacatcgttggattcgtatggcgtatctttcacagtcgtacatcgacggcagaaacaaatcgaggggtatgtgtggtgcctgcacgataactcacgtctcgggttttaaccgctgaacgcacggagactgcaagaatgaagaagcgtccaagtatcgagacgctttacagccacctttatacagcggcagcctccacgtacgtcggattttatggctcattttcggtcgtggcgtcggcatagaataggatgagcgtgctgcatgatgtggggatcaaagtaagacttgacattaagagattacgaagcagccgcgcgttggcacgccttaggcgtgaaccctgagtgaggtgtggagggttcgcgcggcaatgaggacttggagctggttggtttggcgaagggagaattgagaatgagcttgggcgacttcgactagttgctgggtcgtctcaggtgtactttaagcgctgctagagcacgataagagttgaagacgaccttgaacccgattcgtgcctctcactcttgaaaaacctcttttcgcctccgtccaaaagcatcatgattcgacgtaaagactccacctgcgtagttcagttggtagatacatgaccattagccatatgcatctcgggtatggctcacaaggctgctgcgtcagatggagacgcgcagatgtgtttgtgtgatcttttcttgagcgttaatgaagactgcagggcctgcgctgtatgttgttgagagacatagagagagcacggtcggaagcgcagaacgaacgagcctatgtagcacgcgatagcaaagctctacccgctctcaatcctgtcgattacagcgatggtgcttctccgccacctcccgaatacaatagatcgatcaaataggaagcgctaacacttgggtgtgctcggagtttcgctagaactgggccgctccaaccgcagacttggcttttttgcagtactttaccacgtctaaaagaaggcatttttcttttggtggaaagtgacgccacatttcgaacctccgcatgcttcagaaggccctcaagcttctggttgagcgcaggatttttatgtgttaaaagtttcttaattgaaggcggggctcgtatcgtggagtgtagtggtttcaacatttttttggctgcagaggtgagatgtgttcacttagattaaactaacgaattctaatgcaccttgatcgtcctacgcccataagttgcttcgacattgggagcaatcgatgcggcgttaggtaagtacagtacaatagcgtgaagtgtgattgggtgtgatgatactgtctttctactcatagattccctacgcgttcaccttaccgcaccgtccagtattttccggtaccagaagctccgttgtcaaggtgcacagtcccgcgtcaactgtcatcgacgcaatgcagtttaagtggcttacgaacactgttgataagttttgcgtttctccatttattatttttgttattttccagagccgtcgacgccccacggcgttgaaaacacgagcagtgtgtgttgttgagcgcagtaaactattgtcatagcgcctgaatcttgatctgcgtgcactgcaattagtacacgactacgacgtatcttaataatgttggaaatttctttcgtaattatcgtgcctgaccctctacacagaatactaaagaggaaggcgcggccacatgaacagaggtgctcaaatatcctttttcctggttatagctttcgtgccgaacgataatgacgaaatcagcaagtccggtatatgctggtgggaatgcaaacgtgtactccaaacgtagtgtaagttagcgggcccattcaagctacattctttttgaacgcactgttaccaaaaggactacgaaattgttgctgctcgatagttcgcgtatagaccaatgcaaaatactgtatcctgatacagttaggtctgagccacggcattaacgaaatgtcgagtcgttgaaaccactgcagtttacggatgcttttaatacatttctcaatctccatcctagaccgcaagccaattctccaatgcggcattgcatccgatcatgcattcaaccgttttggcgtaaatcctggcaatccttgttgttgaaacgtgccccgctgcctcggtccacgattcgactcaaatgaaggcccagcaaatcggctcacaacgcttactcgcagacgggatcagcactagaaatcccgtagcgaccaatggcaagccagtgaaggaagaatatgcagagagaatgaagatttcgacgccgttcaagcagtaaccttctcagaatatcagtccgaaactcgagaatctaccaaagaatatataggtgatcccagcgctacagcggcgcccgagattgaccaatctcaacaccgactcgaacactaaagagatcacgcgcggcccagagagcctgaagaaactggcgaagcagtcggacgtcgttcaactgtccaagacgtggtcgaaaaatggcgtcagtctcttccaaaaggaagttcaagtattcgagaagccttagcccctcacagaaaccgcaggacccgctgcagcctcatcacttccattctactagtatataacgaagtggttatcgctatcgccgccgcgttcgctgttgcttcttcatctctaatgcatctcagaggggaattcttcatctccggaggacctgtatcggacaattatcaccaagacgacgactgcaaattgcaataccaaggatacctgtagggatgtttacggaataaacatgtacgtaatgtattacagaataaatatgtacgcaactttttcgcatcgtgcacgggaagccagaaaagttggagcgagccaaccttataagataacttcaatggtcagttgccaatttacccggtagcactagcaagtctcggatatgaatctcgtaatcgttgttttggcttggctcacgctgctctgctctgcccttggtggcacgattaatcatgaccaagttaagcccttcgagaaggctgcgatcaagtacaagccttaagacgggtgcgaatcgtttccagccgtgaatgctgcgggtgaaaccagtggcggcctccagggaacgaaaggaagagatggctgcggcaaagcaccactggggtcccaggtatacggccgatctggatggtatcaagacaaatgggccataatgtacgcgtggtacttcccgaagaacttccacgggaacgtacttgactacgaggcgaagaaacgccacgactgggcgagtatggtgctgtggatcgacaatcctgctatcgaaacgtcaaagattctcggcgcgtcgttatcccagcagaatacggaagaaccttaccagaagatggcagaacttcacccgatgttctttgtcggcgccaagcaacacgtaaatggaactgaacccccacgatactaccgtcgccgctatcagtcaccgacatacatttacgcgtatacggcgggctccaatgtaaccacgagagttacccaggcgttcgggtatcctgaaaagggctggaacaagttagaggttgcgtacggagacagccagtcacaggatctcatcatgtgggagcaacttacagatgcagcgcgcgagggcctcaattcggcagattttggggattgtgaaggttcctttcaacgagaaaaacttccaagaatcgctgaaacaagcgtatccgttttagatcggaggttgatgtttgcataacgaactacaatctggcgggagttaagggccaagtttcaaccgcttcacctaaggcataagtagcattgaaatcctagctactacagagagaaaacatggcaataaataaaaaaagcagtcaattgaaagttgtgtttgctgagaaattggcctacaaaacgcgtcaaggtcgctgtatccgttcgtctttaaacggataaaggataaatatttggtcctttcaagtaaaattttatggagttcgttagcgcttcccaatttccaaacagcccgcgacatttatgtatgctagagggaaagctgctacttctgttggtctgcgaaggaacccagtgtcagtagatgatgggggaaagctcagcggtgcatcagggcgtactacagaggagagaaagtcgtacacctacgaggatgctattccggagccgtgttggctgctcgtacatatacttcgaagtattttgatagtttctttgtttcagagctgtttcgctgaagaggaatctgcttgtcttgcgtaaaggcagcggtacaagcttggattaacaagtacagagctggggagagctagggggtgactcagaacagcatcctgatcaaatgcttagcgaacgcctacgttttttattgccagagactcgagtggagagtgcccgtagattgcggccaaagcgttgtgaaattcatcgctttggccgctatcttgatgtttacagaattttccttgtaaacatgaaaattttgcgaatttcgttttcgcaaaaagtcaccgtcaagacatctccacttacatattttccttgtcctctttcattcctgcgtgcagacgcatagttacatgtatagcaggcagtgtgttggcagaaagaaccacgcacggtgcgtgacgcaccaaaaggtacagtcgaagcgatggacaagccgccgctctcgtgtgattgtgagcccaatccgatggtgtaccggtacaggatgtactctcacttccgacacctgtcaaatctagtatcctttacaatttgatatcatcgttagcagggctcacaataaatcgacgccaagcattgagcggctctcaatcaaccgcaagccgccgccgtcgcgcgcgaagcttgcgaggcttacgaagattctgagtgcagcacaagggacgcggaaacgtgtctcttgggtgcggaggtatagggggatggggtgctggcaggtaggcatcgtcttcgccgcaagaacggacagaagggctttaggtagtagacagaggagcagttagcccgcgccgtgggcccctcggcctagcggcaagtagtggggtgaagtgagaacataggagtagaaacgacagaggaagaactggtagatgaagccgtgagaaagcgctggcgtagatagtaaaccagcgtctatagcttcctactagtgctgcagcgcagatagcattcagcgagtgtggatgagctcaaccacaacagctcactcacaacttcgtctcatagttaatttatcgcttgcgctatcattttattggggtgctatggccgctggggctcacaccgatgagccggtgatcaacgaacggagcggcgacgttggtcgccacgccaacttggtgctggtgcgctcatacattagagaactctaaagttctctattgtaatacctgctaactatttatgtgtgcatgaaaaatacacgccagctggtgtcggaagtggcagtactacctgtaactcgagcgggcacatggacttggtcccgtaccgccgacaagatcaactccgtttgcggctctcacgaagcgggctgtcataaagcgggcacgttttgaagatccggagattggtcacagcgagaaggccacaaggacaagtaccgaaatttgtaggactggagaaagtcgtcgccggcgcctttcctgactcggtacctacagggtcggtctttacatgttccgacttcaaagcttctccagcaggacatcaagggtaaatgagggtgaatcgagacatctatcacgaacgtggcattcctttgcatactgtagtatgaagcgagcatctgacaaggaagaacaccgagaagtagcattcgagacgcttgcaaaattaatatgaagcgcagcgccagcatcggatgcgtctctgaaactttcagactgaaagcctgcaaactcgcagtcactcgcgggaatggggcggtcaattggaggaatctatcagtgtcaggtctctaaggtccaacatcaaacaccgccaatatgcaccccaaccgcaagcgtctcgagctcgacacgccacctccctcatctcggtgatcgttcagctcttccgctctaatcgccactccaacagattgttctctcttgagacccaacctgtggctatcgttccgagcagtctgcatggataccatatccataccagcagtttggaggcgacaaattcaacacctggtgttggcctgatacatgtagcgtttgcccgtctatggcgccttgcctgaccgatgccacgtgcgtcccggtcgtggaggcggaaagcacatcttgtagggagctcgggctccctttacagaggccagcctatcctcaactgatagataggctgacgtctgcaatgagctgcactgcagcactggagcagacagtcactcgctttcgcggcactgcgtctcacttgcagattttcgcacgggacggaaggaactgtagtgtaggagcgttgcgatgcctaaggaccgattcagcaggaacccgtacccggacgtgcgcgtgtccgaggaagagcgcgagcacctcatcgacctcgtgaacggctgcgtgcagagccacttccacaagtacgacgagttcgtcgtgaatgccaagcaccaggtggacgagcgacgctgggagcacgtcaagtccaaggacgacatgcacgtgtacactgagcgcgccaacaaggactcggtgaaggacatggccagcatgctcagcgtcggcaccttcgtgggggacctggaggacctcatgttcggcatcctcaacaccacacgagacgccatgcgcgtcaagaccgcgtacgtcggggacatcgacaacggcgccatcctgtgccccgtggtggaacccaccgacgacgagccgttccggacgctcacgatcaagtggatgatcgccgactcgtccagcagcaagtgccgcgacttcgtgtgcatcgaggccaccgacatcctgcagctcgacaacggcgagcgcatgggctaccacgcgctgcactccgtcgagttcccgcagaccaagccgctgcccatgatcatccgcgggaacctgtcgtccgtcaacttcttccgaccaatccacagcactatcatcgacaacttcggctcgtgcttcgtcgacccgggcgtgaaggccatgcgtcgactgtttgtatcaaacacggccaagacgatgctgacggcgaccaactacgtgcgctgcggccagatgaagaagctcgcgtggatgctgcagcgcaccccgccgtcgtccaagctgcgcgacgagacgcagcacagcaacgcgtgcgtcatgtgcggccgacacaagagcatccccggcatcaagaagagcacatgcaagctctgccacggccgcgtgtgctacagttgcaaggtacgggagcacatgagcttcgtgtcgcaggaaggagagctcgtgcagcacaagatcaccttctgctcgctgtgcatgagcaaggctattaactgcagcacccaggaggccgcgagggaccagaccatgagcttccgctcgtgcgggagctcctccaccttctcggagaccacagtcctgggctcgacgttcgcagactccacctactcggcatcaagcatgtcggagaattccttatatcaataattatgagtttataagaccgtgaaacttgccatgtcgttcagagttacatgggacaaactttacctttcatcgttctccgcatgcggtggagatctccatgtgctccaccaaaagaggctgtatctgaaaacctctcatcgcttatatgcttcacttttggcttttggggcgcttattcacttaaatttgtatgaaaacaacaaagtttgcccgaaagcagaaggggtaggctcgcgaagtacaaaataacatatatattttgtaaaaaaacacattttgttttttcagggtttttcggtagctgcttgaagtttacctttggcatgcttctaggattccatactgaaaacaagtggggcgtcaacagatcattacacatagacggtacattatattagtgtttcgcacacacaatttccagccgagatgagcgagggttcttagcggcacgggcgctcccgtggcgcgttatggagtatgcttcctttcgccttctgctaggtgcatcgtccgttgggcggctgcagctgttggtggcgtgttgccatcatccgccgctgagcctgtccagttgaactccccatcgcccaggcacttcccgggacagttcttcctggcgagtgtacattgctgcagtggcttcccacttgtggccatcagtctgcagtactgtagtgtactgtactgtatgagagttcgtgagtaaacttccaagcaagctgccacgcacgcgatccaccctatcaacggatggggagcgctgcccccaaactgctcagtcaaatgctctgtagtgccatctgccgatcgctcgaggctcgggctcagttgccgatttcccctatcggacgcacgtagcaaggaggacactgtaccaacgcaacatggggaaggatcggttcgtcaacgccaatccgtatccggacgtccacgtgtcggaggaggagcggcagcagctcattgagctcgtggacgggttcgtgcaggactatttccgcaagtacgaggagttcgcgaccgtccacaagcacaaggtggacgagcggcgctgggagcacgtcaagtccagagacaacatccacgtctacacggagcgcactcagaaggtcctcaagaagaacggcgtcctactagagccggatgaagaagcatcgcccgaggaagttgtggtcacggagaaggagctgccggttatgctgagcgtgggcaccttcgtaggcgagatggacgacctcatgttcggggttgtgaacccaacgctggatgtcatgcgcatcaaggcttcctacgtgcacgatctggatagtgcagcggtgatgtgccccgtggtggagcccagcgaggaggaaccgttccgatcgcttgtggtcaagtggatgacgattgatgtgccgcttcagtcgaccagcttggtcaaatgccgagactttgtgtacattgaggctacagggatcctgcatttcgctaatggagaccgagtgggctaccacttgctgcactccatcgccttcccgcagaccaagccgctcccgaacaaaattcgcggcaatttgtcggtcttcggcttcttccggcagattgagcacaatgttatcgacaattttgcgagtggaattgtcgatccaggaggcgacattatgcgattcttgttgatcccaaccgcagctgaagctctgctctcagcaacgaactacgtgtactgcggacagatgaagaagatctcgtggatgctgcagcgccgccattcggcctttgcgcggcaaggcaaatcccaagtcaagcaagagtgcgtggcttgtggcaagaaggccactcataagaagttgcgaggaattgggaggagcacgtgcagactgtgctacggctgcgtgtgcttcccgtgcaaggtccgcaagcgcatcagcttcatcacgctgaatggccaccttatccagcgaaagatcacgttctgcgcaaagtgtgtgagcacagcgaccaagtgcgacgctcaggaggcagctagagatcaagctacgggctacgaagcgtataaggccctctccacatcgtctcagtccaataccattgagtcgtcgatgtttgagtagccaagacaacactggcaaagtgggtctgtgtaaagtgcggagaaatgtataaaagaattggcagtgaacactatggttgttgtatagtcttcttgtttcgtgaactgctggatttacaaagatgtcgttgtatcgggaagaagaagcacccaccgatcgagtcagtgagcagagaagcctgcaagtggtggagcgagtgctcaagagtcgaatagaaactactgtggctgcgattatctggtggttctttgttcttgtgctcgatgacatgctaaacgacgcgatcgaaacctcgtgtccctttcaggaaacttcagtccaccccacgctggagctgctggatcgcatttggcagaactcgcgtcttcttgtactttgtatggcgttgacaattgcccggttagtccacaaacaggaattttcgcagtgctctacaactagggtccccgatttcaagaatgacaccctagtacccaaatgcccagaagtgtcggttctcatagcgtgccttcttggaacgagagtgaagacgacggacaagtcgatggacatgagcgtacgagattgtagtacgaagtgtaggtttgacatgtgaaggcaaagtgctaagaaaaatggtagatagaatagaataggaaaatcaataacttctcatatcactccactcactcacgctgccttggaatagctacagcggacgttcatcaatgggggagaccaagtccaatagaggacccagcactgcaaaccaccgacatcccgagtcaatgaatgaagtcgaatacgatcatcaaagttattgaggttgtctattcggaaagtcgaatagaaaagaaggtactatagaaatgatcctgtataagtacggtcttgacctaccattgaaaaacacgccgcacactattacttcagacgaaccatacggctcagactgcatagcttctacagcgataattcgctacttagacatgtacccgctacgtggtacagttcgttttacgcaccatcagcgtgcgcaacatgtattaataattgaactcttcgcaagaccaacaacagcaaatgcaacccctcacaatgtggtcaatgtgaagatgtgaggctcacatcttcacattgaccgctagctaaggcgcctaacgcagtcatcactcactcatcgctaacaagtgattgtagctattcggcccaaaggaaatgccgtaggtgttggtagagcttggtcaatgagagctgaagatgtccaaggagagagtcaaagcttcatcgtcgtcgatgcatgctccatctagtttctttctcctggtcattcaagcagcagctgcaagagcgatgccgcccacgactgccggcaccgcaagagccacaatgaccagcagaaattacccccaccttggtgtggactgcttggtgccctccgatctcgctatatttgaaaggttctgctcgactgattgttctgatcctggttgctgggggtctttgggcaccggcctcggagaactgaagcatacacacaccgtttggtggcagccaccgtgtcagccgtgcagttggttaagctgccgggcttcattgaagatggtcacttcgctctgctgctgcgtagacgaactgctaccagcacttatagtagcaaacacacgtagcattaagcatagctacctccgccactgtagagcaagtcacaaccgatggttttagtacttaagtgcctgttcatccacacttcacgacaaactcgacgctgcaaacgcgctttatggcatcaagtgaggcgtttggtgacttgaccggtttcataccaacagacggccacagctatggatgctgcgctgcttccacgagtgagcgccatgaagcgatactgaactgaattgtttcaacagagcagagcttagagagctccatagcgtaatgcactgtgaatgttgcgaccactaatgatcgcctacatgtcttcgaatggttgctgggctgctatgaacgaagctgctgcagccggcacctcgacgtagtcggggtagattcagcctggtgttccttggatttcagaggcaccgacaaaaaggttgcgcttttcgacggcgcagcatcaaataagcatcttcaagttgtccggctgatggatcggaggggtgtacggtatggtgccgtcacggtgtacaggacacggcactggcgtgttttagcttttatctaccgcggctcttcgtcggtgatttatacccgcgcacacgtgcaaggatgacaggtgtctggtatgctgggaagaagcagtatcagcgcacagtcagcgaggcgatgagcatgatgaaaatcaaatccaccaatacagtcgagcatttccagaaatagtttttcaccgaagttagacgcctctgtttctagattctggtgtatcaaatatggaatggtccatctgccgagtgataagttgaagacatgagcgggccgggcattcgttcgctcctttccatgatcccttcaccgacgctgcccccagaactcatacaacgcactctattcatcgcgctgtacagtacagtaccaccgcgtccaaacctcggaccatccgcttgttgactgcagtccttctgaccccggcgggatgagagtgaccacaccaggtgcgtacgtgcgcgttggttatgcacgttacggcgaagttgccctgtcacgcgcaataaccagaattcggggtgccctgctggaccgagcgatcacaccaggccgagtcgcgcgtggtaaacgcaaatgtaccgagctttaggccgccacaaacgaattcgcaccccagtgagcacaccacaacggagaccatgggcaaatctaccttcactaccaatccgtaccccaaccttgctctgtctgagacggaccgtgagaggctcctgcaactggcggaggacctgatcgtcgacgtcttccccaagtacgagtccttcgtggtgaacgacaagcgcgaggtgaagaaggagcagtggaaggtcatcggcaccgacaagaacatgcgcgtgtacgtggagcgcaagggctggaacgaagacaccgacgacgagaaggatcgttcaactccaaccccagaggccgacccgaacgactcctggttgagcaagatgccggttatcctcgccgagggcaccttcgagggccagctgaacgacctcatgttcggcaccgtgaaccccacgcagcagatcatgcgcgtcaaggcctcgtacgtcaaggattacagcgacggtgcggtgctggccaacatcatcgtccccaccgctgaagagcccttccgctccgtgtccgtcaagtggaaccagatcaacctgccactcaaccagaccgggttgatacagaaccgcgacttcgtctgtctagaggccaccggcatcctgcacttcgctaacggagaccgcataggctaccaactgctgcagtcgatcgagttcccggagactgtgccgacacctgggaccattcgagcgaaacaccgagccattggcttctaccggcagattggccccaacgtcatcgacacgttcgtcttcgacacagtgcaccctggcggcaaagtgttccggtcagtggcgcttgaagcctcagccaaggctctgctgtccaccaacaactacgtcatctgcggacaaaccaagaagctgacctggagactgcagcatcgccaagctgagacccgcatgaaccgccaccgcagcagcacccgcaatattctcgcaggcgaccgcatgtgcacagtttgttcgcggaatctggcgcctgggagcttcgggttccccacagtgggggctctgggcaagagctcgtgcaagctctgcatgaaccccgtgtgcctcaagtgcaagcgccccaaggccatcagcttccttacgcctgacgggaagctgctgcgccacaagatcacgttctgcgtcatgtgcatcagcgaagtcacgcagatggacgcgctgccagcggcccgcgaccaggctgagggctaccaggcctacaacgtcatggcgtcgctctccgggtcagacattctgtccgaggacggcttctgttgaatgctcaaaaaagtgcttcttgtcggttcttcacgtagtcatcgttttcatgtcacttgttgcttctaaacttgagttattagcctgttcactgtttatttcctggttggtagatcccttcgtgtatgagtatttcgagtacttgcttcacctggacacggcaccattttcatactgccagcactttgacagatgagctggacaacttgaagatgcttatttgatgctgcgccgtcgaaaagcgcaacctttttgtcggtgcctctgaaatccaaggaacaccaggctgaatctaccccgactacgtcgaggtgccggctgcagcagcttcgttcatagcagcccagcaaccattcgaagacatgtaggcgatcattagtggtcgcaacattcacagtgcattacgctatggagctctctaagctctgctctgttgaaacaattcagttcagtatcgcttcatggcgctcactcgtggaagcagcgcagcatccatagctgtggccgtctgttggtatgaaaccggtcaagtcaccaaacgcctcacttgatgccataaagcgcgtttgcagcgtcgagtttgtcgtgaagtgtggatgaacaggcacttaagtactaaaaccatcggttgtgacttgctctacagtggcggaggtagctatgcttaatgctacgtgtgtttgctactataagtgctggtagcagttcgtctacgcagcagcagagcgaagtgaccatcttcaatgaagcccggcagcttaaccaactgcacggctgacacggtggctgccaccaaacggtgtgtgtatgcttcagttctccgaggccggtgcccaaagacccccagcaaccaggatcagaacaatcagtcgagcagaacctttcaaatatagcgagatcggagggcaccaagcagtccacaccaaggtgggggtaatttctgctggtcattgtggctcttgcggtgccggcagtcgtgggcggcatcgctcttgcagctgctgcttgaatgaccaggagaaagaaactagatggagcatgcatcgacgacgatgaagctttgactctctccttggacatcttcagctctcattgaccaagctctaccaacacctacggcatttcctttgggccgaatagctacaatcacttgttagcgatgagtgagtgatgactgcgttaggcgccttagctagcggtcaatgtgaagatgtgagcctcacatcttcacattgaccacattgtgaggggttgcatttgctgttgttggtcttgcgaagagttcaattattaatacatgttgcgcacgctgatggtgcgtaaaacgaactgtaccacgtagcgggtacatgtctaagtagcgaattatcgctgtagaagctatgcagtctgagccgtatggttcgtctgaagtaatagtgtgcggcgtgtttttcaatggtaggtcaagaccgtacttatacaggatcatttctatagtaccttcttttctattcgactttccgaatagacaacctcaataactttgatgatcgtattcgacttcattcattgactcgggatgtcggtggtttgcagtgctgggtcctctattggacttggtctcccccattgatgaacgtccgctgtagctattccaaggcagcgtgagtgagtggagtgatatgagaagttattgattttcctattctattctatctaccatttttcttagcactttgccttcacatgtcaaacctacacttcgtactacaatctcgtacgctcatgtccatcgacttgtccgtcgtcttcactctcgttccaagaaggcacgctatgagaaccgacacttctgggcatttgggtactagggtgtcattcttgaaatcggggaccctagttgtagagcactgcgaaaattcctgtttgtggactaaccgggcaattgtcaacgccatacaaagtacaagaagacgcgagttctgccaaatgcgatccagcagctccagcgtggggtggactgaagtttcctgaaagggacacgaggtttcgatcgcgtcgtttagcatgtcatcgagcacaagaacaaagaaccaccagataatcgcagccacagtagtttctattcgactcttgagcactcgctccaccacttgcaggcttctctgctcactgactcgatcggtgggtgcttcttcttcccgatacaacgacatctttgtaaatccagcagttcacgaaacaagaagactatacaacaaccatagtgttcactgccaattcttttatacatttctccgcactttacacagacccactttgccagtgttgtcttggctactcaaacatcgacgactcaatggtattggactgagacgatgtggagagggccttatacgcttcgtagcccgtagcttgatctctagctgcctcctgagcgtcgcacttggtcgctgtgctcacacactttgcgcagaacgtgatctttcgctggataaggtggccattcagcgtgatgaagctgatgcgcttgcggaccttgcacgggaagcacacgcagccgtagcacagtctgcacgtgctcctcccaattcctcgcaacttcttatgagtggccttcttgccacaagccacgcactcttgcttgacttgggatttgccttgccgcgcaaaggccgaatggcggcgctgcagcatccacgagatcttcttcatctgtccgcagtacacgtagttcgtcgctgagagcagagcttcagctgcggttgggatcaacaagaatcgcataatgtcgcctcctggatcgacaattccactcgcaaaattgtcgataacattgtgctcaatctgccggaagaagccgaagaccgacaaattgccgcgaattttgttcgggagcggcttggtctgcgggaaggcgatggagtgcagcaagtggtagcccactcggtctccattggtgaatgcaggatccccgcgtaattgtagaaactacgagctttgccaggttttgcccatttagaaaattcaagataaatcgaaagctgactgtacaataactattgtattgttccactaaaataatgttgttatttagggaagtcgtattgcgattattacggaggaatgacatctgcaaaacacttttattattattgaccggccctgtatgtaacgtacttctctggctcacctaagaatcgacatgtctattctgtcgaagataaataatagctcaaaaagaaaggtgagaattggtgactttgctttatactattgaccgcttaaaaacagcagagatatggagaacagaacaaatttcgtaagcccaattttgggtagcattagtttttgttttacaaaatggatacaatttttagcgatagtatactatacagttattattggaaaactcgattcgctgtcgaaaaaatgctgtgtaacttgttgcggtggcaggcgtgcggatgtcgtggaatttgtctagattttaagcttttcataggcaatttcgtggattcgcactctaatcaaactttttgtacccaatcatgtggctgaaatcgtatatttaaccaatcaggtaatggggttaatctgaattgccgattctttagtggacaagagaagtatacacactgaaacgtctgaatcctaccagcatgacgaaatttcaaggcgcatgtacacaggatcacttttatagtacctcctattctattcgacttttctacattacctccaaggcgtcgatatcgacgccgttgagcgcatctccgtccaccagtttgcgttgtgcgagtacggaagctggagaattctacgacacgatcgagcgcgctcagtcctgcgtactgcaggtcggcggaaaacgccgccgcctcaatgacgttgacgacgactgcgacgtgagtgagtttgccgacacaaacgagattgcccccgtgccccagcgcacatgccatacgcctctagctcctccctgcctcagttctggctgtatatctgcacaatgcgccgcgctttgagtgcacttcattcacgtacatcgcaccaagctttgcttcgctgttgtggttctgtgactcacatgactgccgcactgtcttcttggacggattctcagccgggtgcgcgcgtgacagacccttcactacgagactggtggccgcccttctccactctctcgcgaacgcaactactatgataacactaccgatgtcgacagcactagcggtagaagcatcaaacctcgccgtcggtgctgaagatacgaccgttgacgttgctactcccgccgcgtccgttccgacccctcaatctcccccacgaagaccctacagaactaccatcctagccttcatctccgcctaccgcaaaagcctgatagatttagcaccctgaaagacttggcagaggtgttttcatctgtagtattcagagctggccaattagtgcacacctcatgtattaacccaccttgttttggtgattttcatacattatgtacctacacaactacttccatagcggagaccatcataaccggcgaagagcttggtggtggcctgaacggagagaatgagccggcctcgaagaacgcagcttggatagtcgaggcagcgatagttccaagtgcgtgcgaggagcgtcgcgacgttcctaggctttgcgtggcggtgggcggtgcatgtgcagtgcgctgtaacgggccgttagattgcttttaaaaggagacatgtctcccacatcaagcggctgagccgccgaggtacagccggcagtaactacaccgtgtagatgcccatttcagcaagccgttgccgtacggcagcacctttgtgcactttgaggcattccaggatgaggacgcttgggccgctcacctctgcctatccactcgcgcatgacacgcttgtcaaaccacgccttcgtttgatacgaaaacgtggcgttccccggctcacagtaggtcgtcacttccgcgaacacgtcgttgttgggctcgcccgcaaacacaaagtgcggcggcagcatgcggctatccgcgcacgcgagcagcgcaaccgtgcaccgatagctgccctgtccgcctccaacagcaggaacacgagtaactccgacgaagtccaccgtagtctttgagcccacatcacaaaaaaccgcagtctggtccgtgttgtagagcacgtagggtggcggagtggtcgttgcagcatagacaaagtggtctatcagcaccttggtcacctcgcacgcgaacgcatctcacagcgctattaactcctgcagctgcttgcgccccgagtgggagatacgtctttttgtgaggccgtttcgccgcatgaacttgctgcaccacgactttcgtgcggtagccgttttcccgtcgaggaagcccggaaatagcagcatacactgcgcaatgatgcaatccatgggcatggtccgttcttcacgccgctcgtctttgattcaaccgctcagttcttcctcgacacatacggatggcgagatacgaccactaccgcctacgaccagcttcttcgcacgcttcttgtactcaacggccgatttcatggcgtcgtagtgatgttcccagtactgtagcgtagaacgcgagaagtcttggcccgagcaaaaggtcactcgggtctcacccgacgaagcgaaggctccccggtcttgatcttgaattcgatggtatgggcgagcttgatgcggcgaggaggcattttgtcaatggcaccaaatgatgcagccatatttatttaccttgttttgaaatgcgcttacgactaatcacctctatacgtaattcctattggccaatgagcgacaaccttcaatttctgaaagacttggcactcggcaaaaatgttttagagaagggtgccaaatctatcaggcttttgcggtacaacagtgccgttagggtccgccggagcagcggtcaccctcgcggtagggaggatccctttcgcgaaacgtagtcttgactcgagtggcgacccagattgccaataactcaagcaaggtgaaattgacctttactccgtgagatttctgcccaacaaatcgctacacgtataagactaaggcccctccctcgttatccaacccgcccagcgcaccggtagcagcatccgaccccgttgcacagatccgaactctgcaggtgtgtggtaggcctgccacttagaaaagcgagcgtccgaaaaccacgtattgataatgtgcttcgcgccgcgtttgaatcggggcacaagggactagcaccattccaccatgcgatcagaaaagcgcgtttttgcatgtagcatttcttatccggagcaaagtgcagatcacaaagattgcgaaaaaattcaattagcgagatatcccatccaacccattctcatctgcatgtctatgcatcttttgagtgacatgaaaacagtacataagcactgtgctttcaggtagctcaggtgcacacgcgttgtactgggctttgtctgcatccatcatggcaagttttgaagcggatctgaaactcgctcaatactacacgcttcagaagcgctagacgccatgagatgtctacgcctctgcgctgagatgcgcagtagtaaacaatcggtaggaaccctccagcaccatccgagatacccacaccaaaaacaggatacttacgcttcaccacactatgtgtactatcaagtgcaccagagtggtgaggtcaggatcgttttgaacaatgatgtagcgttccatgaggtgtatacttgttaaggcaatacgaaaggggtacacctccgatcctgtgcccaacaaagagcgtttcgtgccgtcctcctctttagaatcacagagaactagcaaattctctggtttttatccagagtccatgggtggatgccactgaggtgccattattcttgcatcaaatacctgaccaatatgatatttattgctgctcccatatgcagtcgagattcctgttatattaaataacctgctccctaatcaatttatgctgctgtgttgacccatccggttgagattaagacaaattacctattacatttgatactccctaatcaattatatatacctgcgacatctaatttatctaccgctcaagcaacatccatccgatttttttcgctcggtcaacatgctgacgggatcccgccttgaagtgttccagtggtgatgatttcggcatcgctttacactataacaacgacgatgtcgatcccaccgtgtgctgtacacgcaataataagagctcattcctacaattacgtcgcaacgtctgctttgatgagcgagttcatcgacccccagagttgttgtggttaatggaagccgtaatcgagttttcgtatcgagctgccgtagcggctggcgccatagccttttttggcgagaacccgtagggtatcaacactcgttcatggctgaagagatcggggggggggggctaaaggagctgcgaatgcatgcatatccaggaacacaagttgaaatacgcccacttcccaaaaagcgatcacgaaccaggaatgccatactttcgttctatatctaatttttcctcgtgaaattgatgcagcgacagtacatgtacatcaggcagccgaaaaaaattgggggcgccaaaaatggccaactagagaattgggctggatgtgcgcctgaaaacggtatgcaagtccgttgaagcaaaccaaaatcgctcggctacaaacctaccaattaagacattagttctctagacaaactgtactaacctacaggattatccgaaaaacgtgggggccaagacgcaagcagcctaaaggttagccgcgccactcggagtaggacatcccctgcagcttgtcaacataaaggccgcagcgatcatggcgtagattctagcgcgatctcctgtgcttcaatcgtaagaagtgatcgtgtattcctaacaaattcattctccgtgtaatcctaaggaaagttgtatgaaaacgcagagaaaatgatgagtgatccagaccacaggccgttccttagaactagagtatcgatacaactgagtgctcagttcagctttttcggtcgccgcagcagcaatgccttccccccgtgctcacgataaaaactccgctggtgtggcaccgaactagctggacttacctcgctgcagaacaaccgaacgggccgacactcagacaaaatgccctcatctgcacgtcgtcgtgctagctatacttgtctctcgtaagctagttgccgtgccgatgctttcatacacccatagagctgcatgtatactgtataagatactattatcacctagcgatctcttcgtatcagcgcaacatacatggtccgcgcaattagatagcaccactgcatcacgaaaaccatctgcatacaaactagaatagcggggttctaggtgcctccttttagtaaaattcatccttggccggctgggctgtccaaactgaagctctactcctaaacctggcatctgtccaagtaagcgtagcgagcgtttaaggttggaggaccgcgcggagtgcgtagcatagtggtagtttaaatcagtataactcatggctacaaatctactactaagtacttagtagtacttgcatagctttttacaaaagctaccaagctggagtaattcctccttatatgcccaagagcaacgtaaaatccagagctcttccgggcagagcacggctttgtccactggagctcgacttaaatcttcacgagcctacattgcgtgcatacgaatatacatgactggagccatgcttcagatctcactccatcttccgaccacaagtcgttgtccgggcacacaatcaaaattccacgcgtagcgcacacatttgagggcgcagtgaccgcgaggccgcagcaactccatcacatgtcgcggtgcacgggggccgctgatgcggtggtcaaaagtcaaaacaccttgcaggaccaaggcccacgcgagggcaagggtctccgtgtgtttcgatgcagctgaaataccaagggggcgtcgcagaggaatgtcgactcggaggactttgttcacagcgagggcactcacgacggcgggcgtagcagcgactctcgatctccacttaatcgccgaagtcacacgctggcaccacacactccaattcacatctccacgtgcgtcacaagcgtaaatctccatcatactgcacgaaccggtcacacttagagcgtaacccgggtcaatacagcttcatcgtttcaggtcacaagtcggtttcagggcttggtcaatcacttcacaggcttcagcggtctgcttcggggcatatgcgtctcaaaggatgctacacgctcgggtggtcatctcctgcctgcatcgcctggaagggggctcgcgctctagctccctggttaaattcatacaggagggcaccgcagttcaactgagtaactggcagtcattctgcttctctgtagcccttccacttgacgagatactcgcgggtacgtcgggaggtccgagtgcgcttcttccagcgtagatcgaggatcttctcgacctcgtactcatcgttggcagcgtccggctcccagctgttttcaggaagcaaggcagtatcgaagtcatcatcttcatccacatcaatctcttcagctgggcgtttcgggaacagcgcgcgcggtttcagccggctcacatgcacccaagggttcacgcgatagccagtgtctttcactttgagcttgaccctgaaatcgtcatggacctcttcaattcggaatggtccgtgccacaggtgggcaagcttccgactcaaccctggttgcaccttgggtatgtagagccagacggcatcgccttccttgaaaccagccttgagacgctccgacaactccacccacttctgtgtctgggctgctgaccgagcgcgctttacttttcgctgcaagtcctcagcacacgcctgcgcgtagctgtagtctcgctgcagtttgcggcgccactcgtacgcggtgcgttcctggacacccgaaggttttggccccagcatggctgaaaccgtcccttgagcgtcccagccgtggaccaaatagaacggagtgtcaagtcgagtcgcatcgaacgaagtattcaatgcgaacatcaagcgttccgcgtgctcgtcccagtcgctttgatcagactcgacgatgtaggctcggatgcttcgcaccacagtctggacagaccgctcctgttggccattggcttgagggcgatatgccaaagtcgcgcgttgcctgctacccatcagctctctgaaacgcgtgaagacttcgctcatgaatctcgggtcttggtcatggcgcaacattgaactcgcaccaaacctcatgaagacccgttcctcgtacgcctcggcgacatcttgggctgtggtcgaactcatgggcttgcacatcacatacccagagaacgcatcttggaacagcaagagaaacgtgttcccacgctccgacttgggcaggtgcgttacgaagtccattgacacgacctcaaacggacgagtgggttcaatgttcccaggcgaaggtccaggattaggcggtcgtcccttggctgacgcgcagtcagtgcactttttgacgaagacttcgacatcatcatacatccggggccaaaagaactcagaacgcaatttttcatacgttcgagtgataccctggtgtccgccttgatagtcctcatgcgcgtagtgtaacatgtccgggcgcaagttttctggaaccaccaacctcagctctgaatccttgttgcgcgggcgttctggcgtcggagcacttaagcgatacaggacctctctcgaatccaggacgtactggtcggcatacttcgcaatcttcttgacctgatcatgggaaagctggccaagttctcccttcaagtaactcttgattcccatcaggaaggcgtccccgtcctgatgtggcttgatacgcctccatcgttcagcctgatactccaaggaccccatgggctcacgttgctcgtcgtcctcccttgaacgctgccgagtcactgcagtcaggactcgtgcggcgaaggtaagcgggcctagatcagcacccgaatcctccagccgcacaatgttcaccgttccaatgtcttcgggttcagcaccagcaccatgactctccgggttcggagtggcattcggcttcatgacctgttctgggatccgtgagactacctgtaggtccagcagctcatccgcgtcctcgactgtccacgttttgccaagtgccaacgtcttcgatgtcagataatcagcagcctggttgtagaggcgcttggcgtgaaccaactgcaccgtcttgaacttagccctcagcacttcgtactccgcaagccttcgctgcaagttaggctgatggcagttgatgagacctcgtgcctgctggatcacgatcctcgaatctccaaccacgaccacgtcctgaaccccgcgctcagacgctagtttcaggtcattgagcaatccatgatcctctgcgtcattcaccgtcacatcttccagcatgaatccatgtgcttccaagactgtccatccaggcaactgccacaacacacatccgcagctccttgtcgtgtagaagtcttggccgcaccatcaaagcttagagccacaccttggtagtcagcttcaagcatctcgatgctgatcgcaggtggaggcttgatttgtcccttggctggaatgagcccttcagcaatggcatccaggtgctctcggggcgtgatgcgtgcaactaaaatcgcggctagaccatcctcatcgcgctgaactcgggacccgcggcgaaaagccgctgcgcgagcagcaggagtcgctcgtgctgcgccgcaagtttgacatccacaagaccgatgagcgcaagaacttgcacatcaacgacctgatgaagaaccacgataaggcctttacgcagatcacgaactacaacaacgacatcactaagggcaacctatggcttatcgcctcgctcaagaacgagatcgccgtcatgaagaagaaggcagcggccaacaccaaaccccgtgcacgacgtgtcgcagaagaacaagtgccttttggacacgctggctgctgcgatccaggaggtggagcacctccgacacgagctcaaggacgtgcagaagaacaagctctcgctgcgtaacgccaaggcgcggctgatgtatctcgcgcagcaagtgcacgaccttaagcaaaggcaggcggagcgcacaaccaagtaccgcaccatggagtcggaccgcaacgtgctttacgacacgtttgagcacgcgatacagacaattcccaaggagggcgagtgcaagaacctcatcctggagcagtgtctctacgccatggacgaccagcacgcgcgtaagggggctcaagtacaggaggttctgctcgctgctaacctcgaccttgtgcaggcgcggcgcgtgatcgagacgcttggcacgctcctggactcgaagaacacaaagatttgcaacctgcagtacaacgtagccaaggagagcaaagcctacaatgatacactacggacgttcacagagaagttgatacaaattggcatcccagaggaggaaaattgagctctcggcttcaaacggttgacctccaacttcattacaggccaagcgggcctcatagcggtggggtaggtttgtactcagagtcttgattccttttatcaaataacatgtagattcgcgtccatcgagaacgtgtggcgtagtacttgtttgttttagtgacgatgcaaagcgtcagtgtagcttctgacacattgtagcagccactacattcagcgtagtgcaccctgattctgacgcactgcagcaaaataatgtatcacgagcacaaccagtgttgaatagggaatatactgtgatttagtagcaaacagcgatcttaaagctagtacatgtgccataacgatatgtatagtcgaaaagtgtgtggaatagtcgaacgttgcgtggtgtttggctacttcactgtggtgaaacgctctgtttgtgtggacaccttctttatgtacccgcaacgcacagactgtgcgttccctcgtgcttatgcggatggtctacctgtggtggtacaccggcctccgccgtgatcctgtactaggcttgcgcctaggcccactgtactcgcatccgtcatggctttcatgtgcaaccgaaagttaggatagatgagcaagtgaatggaggcatggatttctttcacccactcgaacgctcctagtcgacgtccttcctttgtagtttagtaatcggcgccaccatggatccaaatccttcatcgaatcgccggatgtagctagtccagcgaacaaaccacttggtttcgactgcgtccatagctctgagaaactgtttcacagccgactctaaccgctgtacgccgccactactgagcttgttgtccaagtactctatggaccgagctgtcaagctactctcctccaatttcagagccgacccagcccgatccagccgctctaatacgtttgacatctcgaccacgtgccgctcgatgttgccgcgcggaaagaccacagtgtcatctaggtaggctatacacgttacccaggtaggttctcgtaataccccattcatcatgcgctgaaaggttaacgacgcgttcggcaagccgaaaggtacgtggatagactgatagagcacatttattttcatcacacaaaggcgtttcactattgccaagctcgcccaaccactgaccaactctgttcgcgtccaactcgacgttcatggacaaaatggtcatgttctcatccacggacacccaggtgccaagtttctgtttttagtgtgggtagtttcgccgccttatcgctgctattgatcgctggaacccatgcacgcccattgcgtgtcgtcttgaccgtagccgcgcccgggtagtgcgtggaatagaaagcccgcgctcaccatctaccgccgctacagatacttcccccagttcactgcgtggtccgccctccatgtactgcttaccatacacgccatcgacaatctggcgccagtgcagctgccatggatttttacggccatcgctccgtcgtcgtattcactctcattgcggttgaagtccatcgttgttgctcgctgatttgaatttgtttgttcggcactaaaaatctatttttccgcgctcaaccagaggcgctgttgtcatcggtttccccagataaagctcggaactacctaccaagatccagggcagtagcaggcagtggcggggcctgtcggtaactaccattttgcaagtctccgttctagatttagaccgttctaaaaaatgggctcgttttgccggtgagcccacagcaattctacttatacgtccgatggggtgtagcttccataagtattgtacatgcggctcggccagcacaaccaaaactaacaagactacgttcagataactatggattgcaacaatccccacagactttacattctagagatcaaactcaaaatcatgaacaaagttcaggaataattttggcgatctggaagagggaccctacgcccagtacaaagcagacccaaacggtttgattccaatgtttcagcaaaattaccaatatcgaaccagaaaccgccggtatactgttttggcgcttcgttattgtaactgattgatccttcctggcgggttgggaagtacatggtttggaattacgttgttggaggtttagatggttcaaacccacctgtgtttcatggctgaaatctccctagattcaactatcctcaaagtccccatgtacattgtttcttagactgtcccccacaaacgaatgagcgctttctgtactttactactagaacgatggctcataagaacctgaatcagcttgcacaacatcactggctgtcctcgtgtccgtgacatcatacacacacgtaatcttcaactcgggtcgcgcctcattcaccaactttcctctagaccacaactagccgtcaaccacggccaaaccactggcatctgcccatccatacctaaagtccagccaacgcacccaccaacgctgtagtaaacgcctaagagatgaaaacaggtcaattctaacagttgatcatgggtatgatggacaaataggtcacacatcggtaagcttaaggggtaacatccacacaagatacacacgagatagagggtaaattgcgcgcacgcgtgcattagaatgggcgcaaggtgcgtgtaaacgaaatcggtttcaaagccaatctgtaagtactttcgcgcttttatgaaacgaacgacggtccacttctctagccgcctgttcagacatcatacatcatgtttcctcagcccaaacgacagtacacgacacctccctgagcttcttccgtactctgtcagtgcgctccgcaagatgacacgacgacggaccaaagctgcttctctatcgacgatcaacccatgaacgacgagtcagacggctgacaaggatgacgtagacgacatgggtggcgtgagcgatggcgtgggtatcgatgagggtacgaacggtatgcgagaatatgagcgacgcaatagcgtcaaggacctggagttaccaacgtttacgctatcgccgaaggtctcggtgtccgcgcggatagactacgtgaacttggcgctgaaagaagctgcggagtcgagatgcaggcgcaggttaaataagtctttctgattcatctcggcaacaaaatcatgaagaatcggccgaggggtggccgagtggtgggtcgacatggaccgccagatgcctgaacagaagaggacatagtccaacatgaagaaggacctcttgtggtgttgtggggtttggggaaagttggcagccgagtggcgcgcctatatgcgttgatgatgcccggagagacgcacgcccacttcgcggctggtcttcgagatgtagtcggtcgaaacaaggttagcgagcgcgttttactcacgcatcattcctgtattagatggccaagaagctggcccgccgagatccgaagccgcgcatgcacgggaaggcggtagccaaggcgacggagatcgatgactagatggacgtggctcagagcatgattgatttctgtcgttccgatgggaagtacgacgggaggcaccaacgtgatctcagtaactagttgccgccggagattgtcgcaggtttggacagcgagatggtgcagtctgaggcggagcacgtagctctcttcactaattctcagggcgtctacgacgcctactccgattcgtggggtcctccgcctggcaacgtctggaacggcaagtattagtacgagccgaggaagtcggtgtggaagacggcgccggaatgaacgacgagcagtctgccgaaaacgaagacggcggctgtcaaaccgtaaccgaaaatggagatggtagtgtcgagcgctgaggaggcggatacgaaaccgcggcgtaaacgcggtgaagcaagctgtgaacgaaaagcgacatcgacaggttccccgcgagatttgacacgtggtgaacgaggagaggcgagtgacacgccctacaagctggtcgttacagtgtcctgtggacccgaagtaatgatcggaatctgcttggtgattacgcatgtgagagcacggatgccgaagcaaacgcggaaaacgacgcgtacctggaggagctcagacaaaggcacaagcagcctcggaaaacagtaaacggacgtcgtagacgggttatggcgtccggatctggccgaacgaccccgatgaggacggacgaacgaggatgaataagaacagacggcgacatcgactgtttccgagcgagctgcagcaagtagcgggtggatggcggggttgcggccggtggacattgcgaacaagaaccgcaggcgaattagggcggggtcagggctgccgatgaatgagaacatgacgagtgggtcaagggatgagaagtcaatgacgacgacgtcgagtacgttggcgctgacgccgggctaccgacagccatgatggaggtgaacgatgtacagcggagtgtaaagatcgacagctttgttcgctacactacagcgggcactgagtggatggtgcgcggtgactagggggatacgaagacaccagttgtaatgggcctactttggctcactactttagctttcacgtgtgcgcaagtgtgtgaggaagcgtagcttagtttaaactagagttaattatactcggacctccgagtatagattaatctaaataaacgatccaaataatgttttttgggttaaaatgagaactgctatttttgttttatgctttctgacttcctctaaatgtatagataaatggaattcgtcgtgcaaagtgaacgaaacaaaaactagaaatatttctatgctatttcgatacagtttctatcggcaagagtcgcagtttaagtaacgatggaagctctcgatgctcgcgttgagcaagtgctgggaagtatcacctctgacaacaccaagtacatctacgaactttatctcgcttcatagagtggctctacgagaatacggaggcggatcgacggcaagtcctgtttactagtacgtttcgtgagctgggtgcaattaatggggagagtatcgcgcagtggttctctatcgtccctttacgaagcattgtcaatctaagtgtattaagtactatggagtgtatgcgctacttgacctcgatggagcagcgtggtgtcaccggaaagtcgacttttggaaatgttcgctcggcgatggtgtaccttcacactcagacagagtcctcggtgaatgctactgcaacgatgcacaccgagctttacacatggggtgggggctttcatcaagtgccaagagagtttgtgctacccgcaagaaccgttcgcgttgtgtggcagcaatggtgtgctgggcaaccgccactagagcagctatcaaagcacgatatggcttcaagactacaaaagatccggcttgcagagcttcagcggctgatgcgcttcgttgaagcacttctgacgagtgatgaggtcctgcgagcgcacagctctctcgattcggctggccttctttttgagcaagtaaagaatcgtttaccgttctcatcgacgtcgagtaaaggacgagcgcgtagacttgaccaactatcgtggagaacactcgcccgtgagcatgcaaggcacagctccagctagactagctaccattacgtaggtgagtagcggtaagcttacacaatacacatttacttcgaagtggtagtgtttctactttcacactgtgtaccaaatgtgcggcacaatatgcttcgtgcaaactgcacgatgaattccactacattttgcattattgacagattcatttgatttttgtatatctggcatttttgcattcgtggaattcgccggtcaatttgcaccccgaattctatacgaagtggcagattctcacggcgatttccgtagaagtaatattctaggttaggtatctgccaacggctggttggcagaattctcatgctatgcatgtcgctcattggctaaaatatgctgctttcagccaataggaaccctaagtctctatggaccacccgtcgtggtgatcgtaaatgtatgtagcctttggtgtgtctacaccaaggtcgagaaaatctttcgaacctctaacagacgtcgtgtctgttagagttacaagtgactgtaaccacttgtgcgtgtaaacctgttacaccagtgaactatgcggaggacatccgtggctccctcctggatgttgttgatgtctagcggtttgggtgcatcagtgtggtcgatgatacgatccagactgctgtgcgtcgtggacggatgcacggacgagcccctcgtcggtgtgagggcacgttcctgatcgcaaggcatacaaaacagaagtagcgccggggctgatgggcgtgtcgtgtcgagtgggtgtcaacataaatgctacacaatggggttcgtgatacaaacacagtaatatctgccccgtttctagaatttgaatgttctaaaaagtgtccggtgagccttgcgtggatagatctgtagactaggcgagcagcctgatcggaaaaatgctgtcatcaccgtacaaaccgaagcttacaatttactatcgccaaagcggaattgattcaatatatttgacaataaaccttacatgcaccgacactggacaacacgatggacgtagctccccatccacctagaaggcgcagtaggcttggaaccccacggcctgatcgctcgctgcttccatcgcgctcatgcggttggaatactccacgcacgtcgtgcagaacgcgatcttgtgccgcaacaacttgctgtcgggcgagaggaagctgatggtcttgaccaccttgcacgcggagcacaacccattcatgcagatcttgcacgtgtccttgaagcgcctggcccgacccgaccgaagatcgcggcggcaggtcatgcaaacgtgttggtagtgcggcgcggtcgggacgttctccgctcgtcggcgctgcagcagccaggtcaacttcttcatgagcccgcactcgacgtaattcgtagccgacagtagagcgttggcacacactggtagaaccaccgactctggtaggttaccgcccggctccaccgagtcgaagcagaacgtgtcgatgacgttcggcgcgatctgccggaagaaccccgtgcagttgtgcttggcccgaatcacattaggcaggggttgagtcttgggcgattcgatggagtgcagcatcatgtagcccacccgctctccattagcgaagtgtagaatgcccgacgcctccaggcagataaagtcgcggtcgtgcagcagacccgtgcggcttaggggtagatcgatctggaaccacttgaccgtgaccgagcgaaatggctccgaggcagtaggcgagaccagcgtggccagcacggcgccgtcgctgtaatcccgcacataggacgccttgatgtgcatgatgtccgtcgtggggttcaccgtgccgaacatgaggtcgtccagctgcccttggaacgagccgacgctgagtaccacgggcttgacgccgccgctgcagtcgtcgatgggcaccgggcagcaccctgtctggttgcgccgcatcgagccccgggtcgacttcttggcgtagatgtgcaggtcgtccttggacttgacgtgcttccagcgcgcgaggttcacctgcgagttgctcatgacgtacgcctcgtacttgcggaacgtgtcctcgaccaggtcgttctcgatctcgagcagcatgcgctggtctcgcagcgtgagcagcagcgtgtggtaggggctcatgttgaagcggtccttgggcatcgtcgacgcctccggcggcgggcgagcgtattgcgttgtggtggacaaggcggcggtgcgccccacttctgcatgtgagctaccgcggtgcaacaaggcccggccggactcaatacaatgctactcaagtgcaagtgtgaatggaacagtttgtatggggcgcgtcgatatttgagcccctctcatggcgcaggcgaccagcttgctggcgtaccagcggttgaagctccgtgctacactcttgacgccctcttcaccgtggtttaatggcagcgctatcgcggagatcgggacgcgagcgcggcgggagcgatgactgtcgcttgatggcagccgcgctgccgttctgctgataccgccgtggccacgctggccaccacgggagactcgtaaagcacgccatttgatgccgcgactcccattgtgatgcgcgggacgccgccgggacgagaaggacccttctcgatggtctagaagcgatctgtaggggctacagatgatggcgcgatgtgtaagaaatcattccaaccaacattgaacaagtagatactacaatgctcacaattaatagcgaaattttgtgctacgatcgacagccagaactaggcacctctcttcccacgcacgcgcaactctcatgcgctctggtcacagaccaacgcttaaaacggcaaactatttcaaaattggcctcgaatgtctcggcttcagtagcgagacagcggagcaacacctatttttgcctgctccaaattcgtgtcggtgcagctggagagttcgtgggccacgagggccacacaagaaaacccgactgcattggcgtgcatggcagttcttccgcacggccatgctggtcctggatgcttggacgtgccagtaccttgtgttgacctacgtatttctcgcgcctggatggaatttttcgagattattccctgttggcaacctttttttcttgatcttggtcttgccagccacgtctattcttcgatgatgatcaagtcgcgcccaaacgtagtatatctacagctgacgtcggtctcgacatcgatatccgaggttgaagtatattcctgaaatgattattttgccaggctaacttcttttttttctgaaaaatgtcattagtgtttgtggtggcaatttgcttctggtgcttggcgtgctcaggtagcttttgcaacttgctggctggatggaaatgggagtttccgtgtacagagttccgctgtacgcgaacacacatcactttttacgatttttgaggaccaaatacagcgtacgtcaactatcgagggctacttaagcttgctgttgtcagctttccagctgctagatcgcgtacgataaggttgcatatatatatatcatttgctgtttgcagccttatattatactgcgaagtgcaattattttataaaaccacggcaacatacattgctgccgtagttaatgggaaccgttgattcacacgtttggcgaacttcttggaattccaagtagctattcagagtcaagggtgctagaattgaagtatctgatcgtactttttacgggtttacccgcaagaagcaagaggtgataaaatagctcagtagccacttggctttgcgttgccgtggtcgcttcaactaccgaggctattcacggtgttctaagttcgccaacttccgcttcatctgatcgcgttgtgcgtcaagtcaagtttgtcgctattttgaaggtcaaagcagtattactacttcgtccaggcaagaggcacaaggtcaaaacaatggtcacccagcacgacatggacgatatctcgcgaaaattgttcaacccattcatccttgtgctcgacgcgtggaccttccagcacctcgtgttggtgtattacccacgtcggaaggaattccgagtatggcttctcgtgctggcctcctttattggctttgcaacgcacttgtatgtgtacgacgaccacgacacaatatccatggccaacactgtatccaagacatgcctccaaatgacattcatcatccagatcactatcatcggtcgcgatgtttgtgtcaaggtcaagcttctgtccattcgctggctcacttatattgcggaggctttagtcgtgctggggtgtcttcaagtgctcgcttctttgctggagataactggtgtgagaagtaggggcacaatccacttgctcggcaatatcctcgagaccatctcgctggtgttcgtgctggtgtttcacttctactacttgtcgctctctcgcggctgccgtcgactgataacggagcgcaagttcgagatccttctgtacacatgcttcgccatccacgagttcccgttcatgctgcttgagcaccatactggcgtcacgtgggagttcgcgcagggactttgcaaccgcgtggtactcgcggcgtgtattttgcagaacatccgcaagaaggcagttcccagcggtggcagctccgccgtcttcaagagcaagaggagctccatccttgggtcatttacgtcggcgcgagggtccttcctaaagccgaaagcaaataccgatactcaagaatcacgagccatctcctactcaagtggaactttgatgaagattgtcccaaggcgcagttccggccagccattccctgatatctcaaaaattgcggtgatctccgaaagggccgagagtcaaccgaaagttaccacttcaggagaggaaaaataaaacccacgaaaaatggtttatgcccgcgactcttctaacaatgttagcgtattcgtgctgggttatctccacaaaaatctttctcccaatcgatagcatacaagcctggtaggtgttattcagtatttgctgagtgttttcgcaacgtggacagacaaataacatacttgagtagtagacgtagtgcaatagagctgaaccgcataggacacagtatgcattctattcacgccagtctgtggttttagtatttctgttctgagtttagctggaaggagattcctgtaagcagcgtcgcagcgccgaatctattcgtagcacgaaaaactgcgatgctgttcatcgcctacacggactgacggagttattagaaccaggacgatcttagttttacaaattcctcggtcgggttgcaagaataagcacatcgtttccctctccattcctgggagggtcacacactgaccatttcttcatttcgacggcgttggacagaaagagcgttttataatttgtgttccctgcccggccatggccttcactcaagagggcatggactccatctccagatcgttattcctcccgcttatgttggtgctggacgcttggatgtttgaatacttggtgttggtctactattcaagatggcgagacgtccgtgtgcttgctcctcttcgcggatctgctctccttcatgacccacgtatacttccaccaagacctcgacgtcatgctggctttgaacggagtctccgagaccagtctgcagttgactttcctcatccagatcaccatcatcggccgtgcggtaggtcgcaaagtgaagcttcggtccatcgcccgactgactcgcgccgccgaagttctcatcttgttggggtggctgcacgtatttgtctctatcctcgaggcttcgggcgtgagcacgcacgaccgactgcacttgatcgggaacgtgttggagtctgtatcgctcatcttcgtggtggccttccgcttcttctacttgtcgctgtctggtggctggcaacgcgtacagtgagaaaaagctcgagttagcgctctacagcgcgttcgctctccatgaagttccgttctcccttctggagcaccacgcaggcgtgaagaacgagtttgctcagggaatatgcaaccgcctgctcatcatggcctgcatcctgctcaacatccaccagaaagcgcgtccaagaagccacggcagctacaagagcaaacgcgagtctctcacgaacaatcgggggtcagtcgcatcgtcgagggggtccttgatcaaggtgcctacgggaaggctcagcgtggacattccaacctccttggtgtcgtctcgagcgtccttcacctccttccacacgaccacagtcaagcacaactcgaatccagccttgtcagggttccccgacatcgccaaaattgcggtgacttcgatccagcaaagtggtgatgtactggaggtatcgaccagttgagctagatcaaacagcattccaacatcacagctcttgcagtccctgtgtcacgataactagctattgtcctggcaaattggtttgttgtgtattcctctatatgcatctacttaccgtgcagcccgcactgcttagacagtgtcaggcagcagatagcgcttgccgatcttgcggttgtactccaaaacctgcgcgcgcaccttgcgcttctccatgagcttgtggcgcgtacccgcgagcagtacggcgttcgggtcctccggaatgaggtcggtgaacacgccgtagcgctcggtgagcgcgcggatcttcttcaggtgcttctcctgcagctgcaagcccagcgcatcggcgtcctcgagcgtgttgagcgcgcggcgcatcaggcgcttcctggcgtagtggtccaccaagaagccgaaagttacctcgtcgggctccaggtcgccgttttcaatctccgaacgcacacgctccagcagcttctcggcttgagttgtccgcttggcacgcacgtacatctgcatcatgctgcggtacgagaacttgttgggcttgagctcgaacttggagaacgtctcgtccaggaagacctctgccgagcgtagacgcagcgcgttcgaatacaccgccagcatggagttgagcgtgatgagggacggcttgaggcccttctcgaaggtcatctcgtggaaccgcacttccgcgcgcttgatgttgagcgtctggaacttgccaaagtcctgcaggtccatcggcgtgagctcaaagtccagcgattcttcgctgtcagcgaagagatggtcgtcctcctcgccgtaaacctccatactccgctccgtcttgaccaggtccgtcgtctccgccagcatctcctcgtgatcggccttgtccttcttccgcagctcctccacctgcgcgagggcctccggactcagcttgtagctctccccttcctcctcctctccatcttcgtcaaagcgtccgtcgtaattggcgttcttcagcgaaaaagtctccttgcccgggcgcgttaggtccacctcgttgccctcatcatcccactcgagcggctcctggtagatcggctctggcgggggaggcgccttctggttgcgcggggccttatccacaatggacctgatctgcgcgcgcgcgtacacgttgaagagcgtgttgtacacgaactcggtcatgggcacgtggtgacgctccatgtgtcggatgatctgctccgcctggataaagtcgccgtgcttggcacacgcgtgcagcaccgtcgtgtacgagtacaggtccggcacgtagtcgtacagctcctgcatctcgtagtaaaagtcgatggccttgtgcgcgtagtagtgcgacttggcgcacgcgttcatcagcgtgttaaacgtcaccagggacggcgtaagaccgcactccagcagatcctcgagcaagttgagcgcgcgctccacgcggccttcgcgcgcgaatccgttgatgagacagctgaaggcgatctcgtccggctccgccacgtgcgtccgcatcaagtggaaggtctcaaaggccttgtccaggtccccctcggcaatagccgcgttcatgagaatggtaaacgacgcgcggtccggcacgagccccgccacctgcatcttctccatgacattgtacgcccaggacacgcgcccagccttggagcacgcgcgcatgatggcgttgtaaactgacacgtccggcagcactccgcgctccttcatgcgcccaatgacgcgcacagcgtgcgccgcctggccgtcgactcctaaagctgtcgcgtacagcatatacgacttggcgttgggcgggatcacgtggggcacgctctccagcgcgtccatgagcgccagctccgtgcagtccgagggcttaaccggtaccacggtcttgtccgcggcaatgggctcgaggttcttctccatcctggttaagagcgcgttggcctccttatacaggcccttgacagcatacacgcgcaacagaaagttgtagtcgttgaccgccagctcgtgttgcacttgcccatccccttcaacttcaacttcaacgtccgcccccgaggcagctgcggccgcgcgctgtgtctcaccgacctccttcatgatgtccgggtcggctcgcgcgatggcgttgagcttggcgagcgcgtcgagctcgtccacgtcctcgaggctcggctcgggctcgtacacgtaatcgcccagcgggccggacttgtccatgtactcaaagacctcgtccagctccttgttgagctcctcgttgcgctcgagcgccgcccactccttggcgttgcgcgcgttggcgcgctccccggccttgaggtcgcgcatgcgctcgaggtgcgagcggtgcggcgccgtgtccttcttgagcttctgcttcgtacttagtgcggtgtggctcttgttgcctttgctgcggttccagctcgacgtcttgaccacgtgggccgacgcgccgcccttgcgcttgagcagcacggggctctgcgagacggcgcgcgtctgagatggaggaggtggcgagagcagcgcgccctgcaggtgcgaggcggtggcggccgcgatgggcgcgcgggcggaggcggcgccgcgcgcagccgcggacgcagcgacgcgcagcaacgcggacatgatggcgagtgcggaatgacaggcaaagctctggtggcgagcggctcgactagaggctcggattggtacagatggtacacaagatgggacagatcaagggatgatcggttaagtacgaaacaacttcagcttgtgttagccaatgagagcccctatcgatcttggtacaggaaggtggcgacaggatcaatgttagggagcgagcatgatgctgcttggtctgcactacagtgcccctctttgtcgtgggaccgaggagggaagtcaggcaataaaagtatcagcacacgaacgcgcatggttgcttagagtgtagttccttttgaatagcacacgaatcgcacgtgtatggctgttcatgaacctcgaagaggtattccaggccaaactcagctcagccaagatggagatgctatcgacaaaaagtccttccgataatgcagcctcgcccacatgtagattcgaatatactcttcgatgtttcatttagcacccggacagcgtgtctaagaccgctttcacgtgcaaatacggtctgtacgaatggttggaccatggttgctttcattgtgtgtgtgttcctttgtttatggttgactgagctattcaattgctttgtgttattgctacaagtattcgggtgtagttgatagttcaccttgaagatctttgtccatttgccatacagtacagatccttacagccatgaactacaacattaaacatgcacatgttaaagttactctacaaagaattcgctgacaccgctgtagctggtggcactaaaagtatcagcaacagcaacacttacgaactagatgctacccgtgcaaataattgtacttgaagtaaaataatttaaggtgtactttaagactgcaatgatttggtatctttattcactcgtccacgacatagtcaagattgttcccggttggtaattggcgggtggatgaggaggacaagcccacggcaaccttgttgacatttcgagcggacccggtaacattacgcgcggacgcagatcgaaagaatcgaagactgggtggacttctggcgaaagtgctcccgccggccttggatgtttcttcctctgtcgcgttggacggtcgaccgcttcggacgctgaagctggagcggccactgcgacgagccttgtggatcacgttaagcaagatgcacgagacgatcagcagacgcatgaaaattccctgtacgaactcccacgtcaaccccgttagctcctcgaggagaacgaacggagattcgtgcatcgcgaccatcatatagagcaagaactccatcttccgcttgactatcacgcgtcgaaaccctccggacagcgataaataaaagaagcggaacaccagcacgaaagtgagagagatagtttccagtatattctccactccatgcagtttgcctcccgttggtaatccagcaatctcgattatagaaccgagtatatccacccaactcacgaagattaaagtctctgcagcgtacgtgaaccataaaatggagcgaactttgacctttttagcgacatctcgaccgataatggtgatctggatgatgaacgtcagctgcagacacgtctcggagatatcgttgaactcgctcatcgtctcaaacgtctcgtgcgagtaaatgtgcgtgataaaggcaaggaacgacgcgactagcagcattttgactcgaaactcgcgacgccgtggccaatacacagagatcagatactggaacacccaggcatcgagcaccagcacgatcgggaggaagatcgccctcgataagtcttccatttcctcctgagtgatggccaattgaagttgatgagtgtgccgatttgagtacaacaagtgatgctcgaaatggaaatgcgatcagttgtcgctgtcgcgtgtgttttggtttggcgcacaaataaataatagcgaatggctgttactgatactgaccgctttcttgtctgtccctgaatagcgtacatttgctgcctgtccccagctctttgtagcaacgaactaatcctaggttgggccaggacgtgaggcatctcatgttgaacatggtgcattttagcgacgaatatgcatgtttttcttcgcgctacgtttggcgtttggcggatgcggggcctacgaagattttcttcatgctggcagctttggctatagcggtgttgaactttaacttccgaactagcgcggggatcgttgctagcgttaacagactgggcgtattcccaccgggctctggcatttcttcctcgcgcccggttgaccgcatcgcacttcgaacggtcatgctggagcggccactacgtcgagctttatggatcacgttgatcattatacacgcgacgatcagcacgcgcatgacgatagcttgtacaaactcccagttcacacctgttaaatattccagtagaacgaacgggagttcatgcactgctaccaataaatagagggtgaactccaatttacgcttcgccagcacccgtgcagctccacaagacagcgatagatagaagaagcgaaagaccagcacgaacgcgagcgagagagactccacccaattctccagtccgtgcattctcgtgcccagattgacgcccgcgacttcgagcgcagtctcgagcacgtcgatccaactcgcgaggatcagcacctcggcagcgtgcgtgaagtggacgatagagcggagcttgactttcttggatacatcgcgaccgatgatcgtgatctggatcgtgaacgtcagctgcagacacgtctcggagatgtcgttatattcccacagcgtctcgtacgtctcgtgggagtaaatgtgcgtgataaaggcaaggaacgacgcgactagcagcattttcactcggaactcgcgacgccgcagccaatagacaaacaccaggtactggaacacccaggcgtcgagcaccaacacaatcgggaggaggattcccctcgacaagtcttccagtttttcttgcgtaatagtcatccagcttcaccgtggaaggttccacggaacctaacgtggtggtcgatatggttgacgttaagtagctctgcgagtgctgtcgtcatgcataacgtgcttggtgctggcaaatgaatagcgcatgctgcgtccagctaccattctaatcagccatgcgctttgggtcagaacttgaggctgaatgcgtaagccgttgatcacaaggctgtgacggtattcctgtgtccttgtcgatgtggtgtatttgcacggaattcgtagctgagcgagacggtattttagttaaataaaaaataatggtggttgtttccgatactacaaggtttggcgcgttccttcaccgtatcgttgggggcgccggtccagtcacgccgatcttcatgatgttgctggaagatctcgcacttttcacgcttctcccgctcacgacgctcttgacgcccttgttcaatgtgctccgtattgaagtgacaacagtagaagacatgggaaccaccgcgttgaaagatcgaggagagtgtgcgccactatcctcaccggtcgaggggatgccgctggttgccccacgagtgttcgccgagctctgcttgatcttcttgtgtaagttgagcaagatacaaatcgctatcgttccgcgcatgtagacgccttgcacatactcccacgacactccagtgagatgttcgatcactaccatcacgtcttcatgcgtcgccacgagaaagtagaggaacatctcgagctttctcgcctccagcaccttccggaagccgtttgagagcgacaggtagtagaaccggaagactggaacaaaagtcatggtcaaagactcgagcacattcgaggcaatgtgcatctcgtccgtcagctcgtaccccgcagcctcgatagccgaggccagcatgttgagccagtccagcacgatgaagcactcggcgatgtaggtgaagaccgtgatggagcgaagcttgaccttggctcggacggcgtggccgatgatggtgatctgaatcaggaacgtcagctgcgaacacacctcggagatgtcgttaaaggacaacatcgtctccttgtcttcatggaagtaaacgtgcgacgcgaagccaatgaacgaggccagcagcagcatccggacgcggcgctcgtgccgacgcacgtagtagacggacacgaggtactggaacatgccgaagtcgatcatgagcatgattggcatgaagagggacctggagatggcgtccatgccctcctgggtgagcgccatggtcgcttagttggcttctttacagagttgggaatgggtaggctacagtagactgaatggagtctgcggaagttttgttcgggtatgggaaaggatggtacagatgacgcacctgacctcgtgtgcaaccctcggggactgaggccgttagcttacttgagcacggacggacgggcacgtaggtaaatgcatttgttcctcaacttctgagcgattttggccttaatttatccggagaattcgcagtacttcatgggtattcgtaggtgcaagggggtttcagttttcaactgcacaagaccggcagtccgacgtccatccatccgacttcgttttatcgcgtaggaacatatcaacaagcgggggctggacccagcgcgccacacctacagttttggagttgcctagacatgacagcatgtatctacaatactccgtagtagttgatttagtgttgttgatcgtcaaagttgctgggaagcttgcacgctattcggcaactccaaaataacggcgtgatcctacaatgtgagcttgcaaaaagctacgaatgaatgcaatttcgctgcgcagatccaaggaagcggatgctgatctgttgacttcctatcttgtgtatgctcatgttaaaattcctgcagaaacgtttatttttattgtagatgtctgggtgcttgctctgtgcgaagtctatgtagcagctactctcaaggtcgaatcaactattcttttctccgagtcaccttcttcttagttcagacccgtatcaaaccgaaaagcttgtcaccctggaaaatattcttgatccacgataccgccttctgcgtcatcttgtactggacgaaatgcgtcgccacgaaactaaacaggccccgttcctcgctgccagaaccagactctttctgcttctccagttgtccgaagtcgtagaccttggacggatccgtcggtgtcgactccgagacccgcgagaggcagcagtggccctttccaactctgaaaactctcagtctcattttccgatctccctccaagcgaccaagaccccccccccccacccccacccgcacccacttccctccaagatgcgcgttacccaagtcctgctggcgacttgcattgctctcgctctgagcagcaacgacctcgtatctgcgagggaagttggaatgaagctgaagaggactcctgcgattttctcctctgaatccgaatccgcgtctgaatccgaatccgcgtctggaaccgactccgagtcgggcttggcgtcgctgcccgctgtggaggagggggaggacgacgacaacgacatgttcgtgtacaaggtgccgttcgtcagtggtaatgtcaccggcacgatggtgattaccatcgacaaaaacacagggattccaatctcatgatcgaaagttgccagaatacgaggaaacgcgtctacagtgcactttggttcaccacgagatgctggtggagaaaaattgacaactataatacttagtgttcctggcgacggcggttcagcagaatatgagcaccaacagcctgacgcatgtgacctatttggcattctcctcaatccgataacatcgcggaactgggagaactgtactgtactgtgtcgcagcgctcgaaaatgcatggccgacagctctgttgttcgcgttcagcgactggtctgccgctcttgactgtcttttgactgtcgcgttcgcaagtacgaatagattgcgccttcctgaaaattatccagagagagaataatacctaggtaatacagcatgctcgaacgaaaccgagaccttttgatgattcaactacgtagtaaaagctttccgaaactcacgcgatcttccacgcttcggagctctagcatttaaaaaaaaatggggcgtctcctgaatcgtaaagtgggaatgctggcccatctctaaaaacatcctccttgtgcagaagcctggtaatacaggtagtttacgcgcaaagcagcccattacatcgctttgacaaggcgacacgatcaatgcgatttgtctgcatacaggctacttcctataagactaggatttcagagttgctgcgtttcgaagatcaacataccaaatctgcacttcgtagtcaccaatctttatgctggacgaaatgtgtcgcgaatcgacgaggacccgctcctcgcgatcggattcatacaccttaggtggatccgtcggcgccgagtccgagacccgcgagaggctgctcttgacgacgacattaccgaaggtaataaccatcttgccggtgatgttgtcactgatgaacggcaccttgtacacgaacatgtcgttgtcatcatctcctgcaggcgggcgccgacgccgaaatctgatgcagattcggttccagatgcatactcggatacagaggagataatcattccagctttactcgcaggttgctgttcagagcgaggtcgcttggataacccgcatttattggtaagaagtggaggccttggtcgcttggagggaagttgcatgtcaggtcttagtcagtagatggctgctcggaaattccaaactcgtgatcgaaagttgccttcaaaatacgaggaagcggagtgcgtggacctttggttcaccatcagatgctggcgaaaaaaatgacctcatgccaacgccgattgccttgagattgtgttcacggactaaataactgctgcatcgttgcatcgctctgcagctcgctggcgttcagacagcccaaggacgagaagactcaagctcaatcccgaaagaaggcaataacagcgtcattgtgttgtttctcacgatgagcctgggtaaacgtcaatctgggacggtccaataagccaaggtaatgggaggcgaatgctgcgaggctgcgatagttgctggctgagtcgcgagctcgagctcagtttaactttttgctggtacgagaagaacaggacctggcgtagtgagcaagtatgagagccgccttcgctcggctgcacagggctcgtaacattcgtgggaacccagccatcgtggagcagccggaggtgccggtgccagtgccggcagggccgagagaccatcggagcttcatttgggtctcctcacgcgacgcggagatctacccgctggtcttctgcgtctcggttggcttcgtgatcgggacgttcagcctcgttcgccacctgatgttgaaccccgacgtgaacctgagccgcgaccgccgcgagacgcccgcctgggagcgctacaagcctgaggaaggatcaaagttctcgcgcaaccgccaccactttgccaacctcaagccgaacccggtcaaccagtttccagaggcgaaaacgctgcaggaaggggctgacgagccgttctccgagcacctgtaaggctcatccagggagaagcagtgtggacgcacaactttcgtaagtataggattgatagcgaagcctgtgagagaagttagtaggattgaccggttaacacgcaatcgactttttaagatacttatgccaattccattttactcattgtcattgaccagcacctccgagccattctgcaacacaagaggcaggcagacacaatcagcacaaggcataatatacatcgcatagcccatttgggaagacgcacctgcattccgtagtagctgacttctgcgctgtcgtcgtcgagcagcatcggcatgctctatttgaccaagccaaagaagtacaagaagtattcaacgtcagacacaaagtattggcacgaacacattgaaaagccagccttctcacccttgcgtcgctgcgaaacgacagcacctgggctggaactgccacgccgaacttggtttcgatcaggagcttcaactgcgacaccttcatctgctgcgggatcttcttcaccaacggctccagcgacgtggccttcatggacatggggacgatgctgaccttgatgaggctggacgccagtttgcgcgggccggcagctgatgcagagtcgagaccgactccaccgctctcgatggagatctcggggtacagctcacgcagccgagcgtaccgcgggtgagctgctagtacgcggtctcgctcgctcttgtcgtcgccgatcacggccagttcgtgcaggacgcgcttcaagtagagctgctccgcctcctggcgctccttctcgcgcacggggctcgcgttgaacaccgcgatccggtccgtccgcgccacgaccagcaggcgagcttcccccacgctcatctgcgcagtgagcgggttcttggtcagtcgcagcgtgtccagcagcgggaaggcgttcagcgcgtcgatggacgtccacgagtccaccaagttgccgctcagcgacaacgtccgcagcttctggaacgccacagcagccggagacttgaggtccgcgtgggcgacgagcgtcacaatgcggttgtcgttcaggaagagctgcgtcaagttgacgaacatccccccagccacctgccgcacgcgcctccaggagctcaagcggttgagactcagatccagcagctccagcgtctccagccagcccgcaccaccctcaaacttcgtcagctgctcgtcgtcgtactcgttgtccactagatgcagctgctcgagcctcgggaagtggcgggtcacgagtctcccgacgtccggccacgacagcagcgtctggttcagcaccagcaccttgacgttgtcgaaaactccctccttgtcatcgtcgtcgtcctccccctcctccacttgaaacctgttgccactgaggatcagcgtctccagcaggggtaagtttttgacaatgtccaaaatgtacttccacgagccaaacaggttccacgacaggtccagctccgtgagcttgggcgtcaacgtgccaaggctctctccttcgcccagccccgcaatctgacaaccagacagcgagatcttctcgatcgtctgcagcgtctgctgggtgctgagctttttgacgcccacgagctcgatgggcttctcgctgcccaaagtggtgcccacgccgcccgccaccgtcacgtcggacccactgtcaccactgccgaaagccgtatcttggctgccgtagcgctcctgaagccgctgcagcagcgagctgtgtttttgacacgacttgtcgaaaacggacatcttggcgaacgaacacttgaagctcagcacgccgtcgactttgcgacccgcgggcccggggaagtgcacgacgcgccggccgtcgggcagctccacgctgccgtcgttcttgccgcggccccaggcgtcccactcgacgccgtagtacagcgttgacgcgtccttggccgtcgccacgggacccacgtagcgcacggtgccacgcgcaccggtcgcgtcctccacgcggtctccgacggcgtgcgcaggcgcagcaagcggtgccgacgacgtgtccatttcgcggatgtgtttttgacggaaaagacgccaagtaaaaaatacccgtttatcgtcaatactttgccaataagagtaggcatatttgtcatacatattacgccatttaattgcagtactgcatacgggtttgggacagaatccgtataccgataggtagtcatgtcttcatcggctttcctgcaaggattcgcgagcaactactccagttagtgcatgtatatcttcattgagtactgacgtccatgaaggtgttggtgatggttatcattagtttgctaactgcatgcttacgttcaaaactctatacaaagtcggctgcgagcgcatgtcgatcagcagccagatcctccagcgatgcgcatgcacgaggtcgagtcgaacagactcagcacgttggtcatgatgatccagaagaaggcgaagacgaggtagcacaccgtcagcgtgccgaacagcttgctcttgccgccctgagccttgagcgcgtgcacctccgacttctgtcgaggcagccagaccacgatagtcaagcgcacgtagatgccctgagcgtactcccacgtcacccccgtggcgtattcgagcgtgatgaacaaatgctcgtgcgaggcgacgaggacgtagacgaacatctccagcttgcgctcgctcagaacctgtcggaagctgctggacagcgacaggtagtagaagcgaaacaccggcacaaacgtcaacgtcacggactcgagcacgttcgagaacaggagcagtccatcgcccagctcgactgtggatgcgagcatgttgacccagtccagcacgatcagagcttcggcagcgtacgtgaaccacgtgatggaccgcagcttgaccttggcgcgcaccgcgtggccgatgatggtgatctggatgaggaacgtgagctgcgcgcaggcctcggagatgtcgttggacgtcagcatcgtctcgacgtcgtgctcgaagtacacgtacgacgcgaagccgatgaaggaggccagcagcagcatctgcacgcgtcgttcgcgcctcctggggtagtatacggggaccaggtactggatgcagtcaccgagaagagtgacaggatctggcatgaagaaccggaacgcgagacggcgtccattccgtcctgggtgatagccatgactactacaggtacgcccaaaacttcctcatggacttgcgcggcaccttctcctccgtcacgcagaaccagcagagcgggatcgtcacgaacgagaaggcagcgcagacgcccatgatggcgttgaagcccatggtccaggagaagtcgccgccgtagtccgtcccgttgagtccgagccccgtcatgaacgccgccagcaccatgaagacctggcgcgtagcagacacgtgtgcctgcgttgtgcctgtttactccttctgttgcgcatgatatcccaacctcaacaagagatcctgtgaatacgacgagggagaactacggtcgaccatcggacgcacgaacaacgaggagctgtacatgtatcggggatgaggtggggtcgcgacgttcgtcggtcctgatgaacaactcgtctccacacacactcagcgtaggaagcaccgcaggagtgtcacgagctctggcatggtcttgatcgaagcgaggccgtccgccgtcgcttgcttcgagtcgattggcttggcgccacgcgctttcacgccaacttcatcagtcgaacttcgactcgatggtgtctcgcttatcccccgccatcgcagccaccatgtgccagtgacgcttttgtcgggggtcacacactggtttgtattgcacgccaggctcacgctgccggtcgagtcatccgttttgcgtgcagtttaccctctcttgcagggtcgagctgtctggacgaaccatttccccgttaattcagcgattaacgacgcctgaatccgagcccatcgtcaggacatccgcgctgtccaccatcctggcgatccagttgggtcgaggcacgcgcgggtcacctttcactgtgcgctgccagcggaggatgactgacacgtatcccagggtcgagtggacagtcgacactgtcgactagggatccctacgatggtcgactgtctccaggaaggtccacggtctccgctacgctgcgatcgactggcggcggagtctaccggcagctgccgctgtgtggctggcacttctcgatttgcaggcttgcaagtatgagggcatcggctgaagttccaagcacccccgagccgaccaagctggctctggaatctcctggtgtcgactatgaagcagtgaagacgccggttgacattgaagggggcgcgctcgagcctggaggcgcgccgtcagtcttctcgtggcaacacgttggtctgctcgcccacattgcgtccgtcggcgtcgtatacggcacgctatctggagtcatctacgccgtcttaaataactacctttacatgtcggccgtgcttacagcaaccgcgcaagctctggtgagactgccacgagctctgcgcttgttcaccgccgtcttctccgactgctaccccatcttcggctatcgacgtcggccgtacctgatcatgggttgggtgctcacgttcgtgtgctgcttcttgatggcagtgctgcctctgggcgacccgtactacggcgatccagcgctagccgacattgacgaagacgagctcacgcccgagcagcaagcgctgatcaactacgacgcatctgacaagggcatcaagctcatcatcttcttcgtgttcgccaacctaggcacggtcatctcgttcggcgcctcggacggctacatggtggagttggcacgccgcgaaccggaggccattcgaggcacaacgcaggcacacgtgtctgctacgcgccaggtcttcatggtgctggcggcgttcatgacggggctcggactcaacgggacggactacggcggcgacttctcctggaccatgggcttcaacgccatcatgggcgtctgcgctgccttctcgttcgtgacgatcccgctctgctggttctgcgtgacggaggagaaggtgccgcgcaagtccatgaggaagttttgggcgtacctgtacgacctggtgcagcaccgcgtcatgttccaggtgatcgcgttccggttcttccgccagatcctgtcactcttctcggtgactgcatccagtcccattcagagcacgtgggccaaagtgacgccgttgaacgagggcatctccgagatgctctcgtgtctcgtgacgttcgtgtcgctgtggatcgtgcgtcgctatggactgcactggagctggaaggtcgtcgtcatcgtgtgtcagttcggcgtcgtcttcgtggacgccttccccacgttcttcactatctggaacgtgtaccgcagtcagtggttctggttgggtgtgccgctgctggaggagtttcctaacagtatcggcgacttcatcgccactctgttcgtggtggaggtctgtgataagggcagcgaggccaccgttatgggcttgatgatcaccatctcggctctaggcacgccgtttgcgacggtcctctacaagacggtggacagctacttcgagatcgagcgcaagttcatcgtcaaggacgaccaccacgtgcgctcgcaggtcatgtacgcgtacctcatcgcctacgcgtgcaacctcatctccgtcatttttgtggtctggctgcctcgacagaagtcggaggtgcacgcgctcaaggctcagggcggcaagagcaagctgttcggcacgctgacggtgtgctacctcgtcttcgccttcttctggatcatcatgaccaacgtgctgagtctgttcgactcgacctcgtgcatgcgcatcgctggaggatctggctgctgatcgacatgcgctcgcagccgactttgtatagagttttgaacgtaagcatgcagttagcaaactaatgataaccatcaccaacaccttcatggacgtcagtactcaatgaagatatacatgcactaactggagtagttgctcgcgaatccttgcaggaaagccgatgaagacatgactacctatcggtatacggattctgtcccaaacccgtatgcagtactgcggcagcgtatgttgtatcaataccaaaggcgtatgaaaccaacataacctttgacgataaacgggtattttttacttggcgtcttttccgtcaaaaacacatccgcgaaatggacacgtcgtcggcaccgcttgctgcgcctgcgcacgccgtcggagaccgcgtggaggacgcgaccggtgcgcgtggcaccgtgcgctacgtgggtcccgtggcgacggccaaggacgcgtcaacgctgtactacggcgtcgagtgggacgcctggggccgcggcaagaacgacggcagcgtggagctgcccgacggccggcgcgtcgtgcacttccccgggcccgcgggtcgcaaagtcgacggcgtgctgagcttcaagtgttcgttcgccaagatgtccgttttcgacaagtcgtgtcaaaaacacagctcgctgctgcagcggcttcaggagcgctacggcagccaagatacggctttcggcagtggtgacagtgggtccgacgtgacggtggcgggcggcgtgggcaccactttgggcagcgagaagcccatcgagctcgtgggcgtcaaaaagctcagcacccagcagacgctgcagacgatcgagaagatctcgctgtctggttgtcagattgcggggctgggcgaaggagagagccttggcacgttgacgcccaagctcacggagctggacctgtcgtggaacctgtttggctcgtggaagtacattttggacattgtcaaaaacttacccctgctggagacgctgatcctcagtggcaacaggtttcaagtggaggagggggaggacgacgacgatgacaaggagggagttttcgacaacgtcaaggtgctggtgctgaaccagacgctgctgtcgtggccggacgtcgggagactcgtgacccgccacttcccgaggctcgagcagctgcatctagtggacaacgagtacgacgacgagcagctgacgaagtttgagggtggtgcgggctggctggagacgctggagctgctggatctgagtctcaaccgcttgagctcctggaggcgcgtgcggcaggtggctggggggatgttcgtcaacttgacgcagctcttcctgaacgacaaccgcattgtgacgctcgtcgcccacgcggacctcaagtctccggctgctgtggcgttccagaagctgcggacgttgtcgctgagcggcaacttggtggactcgtggacgtccatcgacgcgctgaacgccttcccgctgctggacacgctgcgactgaccaagaacccgctcactgagcagatgagcgtgggggaagctcgcctgctggtcgtggcgcggacggaccggatcgcggtgttcaacgcgagccccgtgcgcgagaaggagcgccaggaggcggagcagctctacttgaagcgcgtcctgcacgaactggccgtgatcggcgacgacaagagcgagcgagaccgcgtactagcagctcacccgcggtacgctcggctgcgtgagctgtaccccgagatctccatcgagagcggtggagtcggtctcgactctgcatcagctgccggcccgcgcaaactggcgtccagcctcatcaaggtcagcatcgtccccatgtccatgaaggccacgtcgctggagccgttggtgaagaagatcccgcagcagatgaaggtgtcgcagttgaagctcctgatcgaaaccaagttcggcgtggcagttccagcccaggtgctgtcgtttcgcagcgacgcaagggtgagaaggctggcttttcaatgtgttcgtgccaatactttgtgtctgacgttgaatacttcttgtacttctttggcttggtcaaatagagcatgccgatgctgctcgacgacgacagcgcagaagtcagctactacggaatgcaggtgcgtcttcccaaatgggctatgcgatgtatattatgccttgtgctgattgtgtctgcctgcctcttgtgttgcagaatggctcggaggtgctggtcaatgacaatgagtaaaatggaattggcataagtatcttaaaaagtcgattgcgtgttaaccggtcaatcctactaacttctctcacaggcttcgctatcaatcctatacttacgaaagttgtgcgtccacactgcttctccctggatgagccttacaggtgctcggagaacggctcgtcagccccttcctgcagcgttttcgcctctggaaactggttgaccgggttcggcttgaggttggcaaagtggtggcggttgcgcgagaactttgatccttcctcaggcttgtagcgctcccaggcgggcgtctcgcggcggtcgcggctcaggttcacgtcggggttcaacatcaggtggcgaacgaggctgaacgtcccgatcacgaagccaaccgagacgcagaagaccagcgggtagatctccgcgtcgcgtgaggagacccaaatgaagctccgatggtctctcggccctgccggcactggcaccggcacctccggctgctccacgatggctgggttcccacgaatgttacgagccctgtgcagccgagcgaaggcggctctcatacttgctcactacgccaggtcctgttcttctcgtaccagcaaaaagttaaactgagctcgagctcgcgactcagccagcaactatcgcagcctcgcagcattcgcctcccattaccttggcttattggaccgtcccagattgacgtttacccaggctcatcgtgagaaacaacacaatgacgctgttattgccttctttcgggattgagcttgagtcttctcgtccttgggctgtctgaacgccagcgagctgcagagcgatgcaacgatgcagcagttatttagtccgtgaacacaatctcaaggcaatcggcgttggcatgaggtcatttttttcgccagcatctgatggtgaaccaaaggtccacgcactccgcttcctcgtattttgaaggcaactttcgatcacgagtttggaatttccgagcagccatctactgactaagacctgacatgcaacttccctccaagcgaccaaggcctccacttcttgccaataaatgcgggttatccaagcgacctcgctctgaacagcaacctgcgagtaaagctggaatgattatctcctctgtatccgagtatgcatctggaaccgaatctgcatcagatttcggcgtcggcgcccgcctgcaggagatgatgacaacgacatgttcgtgtacaaggtgccgttcatcagtgacaacatcaccggcaagatggttattaccttcggtaatgtcgtcgtcaagagcagcctctcgcgggtctcggactcggcgccgacggatccacctaaggtgtatgaatccgatcgcgaggagcgggtcctcgtcgattcgcgacacatttcgtccagcataaagattggtgactacgaagtgcagatttggtatgttgatcttcgaaacgcagcaactctgaaatcctagtcttataggaagtagcctgtatgcaaacaaatcgcattgatcgtgtcgccttgtcaaagcgatgtaatgggctgctttgcgcgtaaactacctgtattaccaggcttctgcacaaggaggatgttcttagagatgggccagcattcccactttacgattcaggagacgccccatttttttttaaatgctagagctccgaagcgtggaagatcgcgtgagtttcggaaagcttttactacgtagttgaatcatcaaaaggtctcggtttcgttcgagcatgctgtattacctaggtattattctctctctggataattttcaggaaggcgcaatctattcgtacttgcgaacgcgacagtcaaaagacagtcaagagcggcagaccagtcgctgaacgcgaacaacagagctgtcggccatgcattttcgagcgctgcgacacagtacagtacagttctcccagttccgcgatgttatcggattgaggagaatgccaaataggtcacatgcgtcaggctgttggtgctcatattctgctgaaccgccgtcgccaggaacactaagtattatagttgtcaatttttctccaccagcatctcgtggtgaaccaaagtgcactgtagacgcgtttcctcgtattctggcaactttcgatcatgagattggaatccctgtgtttttgtcgatggtaatcaccatcgtgccggtgacattaccactgacgaacggcaccttgtacacgaacatgtcgttgtcgtcgtcctccccctcctccacagcgggcagcgacgccaagcccgactcggagtcggttccagacgcggattcggattcagacgcggattcggattcagaggagaaaatcgcaggagtcctcttcagcttcattccaacttccctcgcagatacgaggtcgttgctgctcagagcgagagcaatgcaagtcgccagcaggacttgggtaacgcgcatcttggagggaagtgggtgcgggtgggggtggggggggggggtcttggtcgcttggagggagatcggaaaatgagactgagagttttcagagttggaaagggccactgctgcctctcgcgggtctcggagtcgacaccgacggatccgtccaaggtctacgacttcggacaactggagaagcagaaagagtctggttctggcagcgaggaacggggcctgtttagtttcgtggcgacgcatttcgtccagtacaagatgacgcagaaggcggtatcgtggatcaagaatattttccagggtgacaagcttttcggtttgatacgggtctgaactaagaagaaggtgactcggagaaaagaatagttgattcgaccttgagagtagctgctacatagacttcgcacagagcaagcacccagacatctacaataaaaataaacgtttctgcaggaattttaacatgagcatacacaagataggaagtcaacagatcagcatccgcttccttggatctgcgcagcgaaattgcattcattcgtagctttttgcaagctcacattgtaggatcacgccgttattttggagttgccgaatagcgtgcaagcttcccagcaactttgacgatcaacaacactaaatcaactactacggagtattgtagatacatgctgtcatgtctaggcaactccaaaactgtaggtgtggcgcgctgggtccagcccccgcttgttgatatgttcctacgcgataaaacgaagtcggatggatggacgtcggactgccggtcttgtgcagttgaaaactgaaacccccttgcacctacgaatacccatgaagtactgcgaattctccggataaattaaggccaaaatcgctcagaagttgaggaacaaatgcatttacctacgtgcccgtccgtccgtgctcaagtaagctaacggcctcagtccccgagggttgcacacgaggtcaggtgcgtcatctgtaccatcctttcccatacccgaacaaaacttccgcagactccattcagtctactgtagcctacccattcccaactctgtaaagaagccaactaagcgaccatggcgctcacccaggagggcatggacgccatctccaggtccctcttcatgccaatcatgctcatgatcgacttcggcatgttccagtacctcgtgtccgtctactacgtgcgtcggcacgagcgccgcgtccagatgctgctgctggcctcgttcattggcttcgcgtcgcacgtttacttccatgaagacaaggagacgatgttgtcctttaacgacatctccgaggtgtgttcgcagctgacgttcctgattcagatcaccatcatcggccacgccgtccgagccaaggtcaagcttcgctccatcacggtcttcacctacatcgccgagtgcttcatcgtgctggactggctcaacatgctggcctcggctatcgaggctgcggggtacgagctggcggacgagatgcacattgcctcgaatgtgctcgagtctttgaccatgacttttgttccagtcttccggttctactacctgtcgctctcaaacggcttccggaaggtgctggaggcgagaaagctcgagatgttcctctactttctcgtggcgacgcatgaagacgtgatggtagtgatcgaacatctcactggagtgtcgtgggagtatgtgcaaggcgtctacatgcgcggaacgatagcgatttgtatcttgctcaacttacacaagaagatcaagcagagctcggcgaacactcgtggggcaaccagcggcatcccctcgaccggtgaggatagtggcgcacactctcctcgatctttcaacgcggtggttcccatgtcttctactgttgtcacttcaatacggagcacattgaacaagggcgtcaagagcgtcgtgagcgggagaagcgtgaaaagtgcgagatcttccagcaacatcatgaagatcggcgtgactggaccggcgcccccaacgatacggtgaaggaacgcgccaaaccttgtagtatcggaaacaaccaccattattttttatttaactaaaataccgtctcgctcagctacgaattccgtgcaaatacaccacatcgacaaggacacaggaataccgtcacagccttgtgatcaacggcttacgcattcagcctcaagttctgacccaaagcgcatggctgattagaatggtagctggacgcagcatgcgctattcatttgccagcaccaagcacgttatgcactcgcagagctacttaacgtcaaccatatcgaccaccacgttaggttccgtggaaccttccacggtgaagctggatgactattacgcaagaaaaactggaagacttgtcgaggggaatcctcctcccgattgtgttggtgctcgacgcctgggtgttccagtacctggtgtttgtctattggctggagttccgagtgaaaatgctgctagtcgcgtcgttccttgcctttatcacgcacatttactcccacgagacgtacgagacgctgtgggaatataacgacatctccgagacgtgtctgcagctgacgttcacgatccagatcacgatcatcggtcgcgatgtatccaagaaagtcaagctccgctctatcgtccacttcacgcacgctgccgaggtgctgatcctcgcgagttggatcgacgtgctcgggactgcgctcgaagtcgcgggcgtcaatctgggcacgagaatgcacggactggagaattgggtggagtctctctcgctcgcgttcgtgctggtctttcgcttcttctatctatcgctgtcttgtggagctgcacgggtgctggcgaagcgtaaattggagttcaccctctatttattggtagcagtgcatgaactcccgttcgttctactggaatatttaacaggtgtgaactgggagtttgtataagctatcgtcatgcgcgtgctgatcgtcgcgtgtataatgatcaacgtgatccataaagctcgacgtagtggccgctccagcatgaccgttcgaagtgcgatgcggtcaaccgggcgcgaggaagaaatgccagagcccggtgggaatacgcccagtctgttaacgctagcaacgatccccgcgctagttcggaagttaaagttcaacaccgctatagccaaagctgccagcatgaagaaaatcttcgtaggccccgcatccgccaaacgccaaacgtagcgcgaagaaaaacatgcatattcgtcgctaaaatgcaccatgttcaacatgagatgcctcacgtcctggcccaacctaggattagttcgttgctacaaagagctggggacaggcagcaaatgtacgctattcagggacagacaagaaagcggtcagtatcagtaacagccattcgctattatttatttgtgcgccaaaccaaaacacacgcgacagcgacaactgatcgcatttccatttcgagcatcacttgttgtactcaaatcggcacactcatcaacttcaattggccatcactcaggaggaaatggaagacttatcgagggcgatcttcctcccgatcgtgctggtgctcgatgcctgggtgttccagtatctgatctctgtgtattggccacggcgtcgcgagtttcgagtcaaaatgctgctagtcgcgtcgttccttgcctttatcacgcacatttactcgcacgagacgtttgagacgatgagcgagttcaacgatatctccgagacgtgtctgcagctgacgttcatcatccagatcaccattatcggtcgagatgtcgctaaaaaggtcaaagttcgctccattttatggttcacgtacgctgcagagactttaatcttcgtgagttgggtggatatactcggttctataatcgagattgctggattaccaacgggaggcaaactgcatggagtggagaatatactggaaactatctctctcactttcgtgctggtgttccgcttcttttatttatcgctgtccggagggtttcgacgcgtgatagtcaagcggaagatggagttcttgctctatatgatggtcgcgatgcacgaatctccgttcgttctcctcgaggagctaacggggttgacgtgggagttcgtacagggaattttcatgcgtctgctgatcgtctcgtgcatcttgcttaacgtgatccacaaggctcgtcgcagtggccgctccagcttcagcgtccgaagcggtcgaccgtccaacgcgacagaggaagaaacatccaaggccggcgggagcactttcgccagaagtccatccagtcttcgattctctcgatctgcgtccgcgcgtaaagttaccgggtccgctcgaaatgtcaacaaggttgccgtgggcttgtcctcctcatccacccgccaattaccaaccgggaacaatcttgactatgtcgtggacgagtgaataaagataccaaatcattgcagtcttaaagtacatcttaaattattttacttcaagtacaattatttgcacgggtagcatctagttcgtaagtgttgctgttgctgatacttttagtgccaccagctacagtggtgtcagcgaattctttgtagagtaactttaacatgtgcatgtttaatgttgtagttcatggctgtaaggatctgtactgtatggcaaatggacaaagatcttcaaggtgaactatcaactacacccgaatacttgtagcaataacgcaaagcaattgaatagctcagtcaaccataaacaaaggaacacacacacaatgaaagcaaccatggtccaaccattcgtacagaccgtatttgcacgtgaaagcggtcttagacacgctgtccgggtgctaaatgaaacatcgaagagtatattcgaatctacatgtgggcgaggctgcattatcggaaggactttttgtcgatagcatctccatcttggctgagctgagtttggcctggaatacctcttcgaggttcatgaacagccatacacgtgcgattcgtgtgctattcaaaaggaactacactctaagcaaccatgcgcgttcgtgtgctgatacttttattgcctgacttccctcctcggtcccacgacaaagaggggcactgtagtgcagaccaagcagcatcatgctcgctacctaacattgatcctgtcgccacattcctgtaccaagatcgataggggctctcattggctaacacaagctgaagttgtttcgtacttaaccgatcatcccttgatctgtcccatcttgtgtaccatctgtaccaatccgagcctctagtcgagccgctcgccaccagagctttgcctgtcattccgcactcgccatcatgtccgcgttgctgcgcgtcgctgcgtccgcggctgcgcgcggcgccgcctccgcccgcgcgcccatcgcggccgccaccgcctcgcacctgcagggcgcgctgctctcgccacctcctccatctcagacgcgcgccgtctcgcagagccccgtgctgctcaagcgcaagggcggcgcgtcggcccacgtggtcaagacgtcgagctggaaccgcagcaaaggcaacaagagccacaccgcactaagtacgaagcagaagctcaagaaggacacggcgccgcaccgctcgcacctcgagcgcatgcgcgacctcaaggccggggagcgcgccaacgcgcgcaacgccaaggagtgggcggcgctcgagcgcaacgaggagctcaacaaggagctggacgaggtctttgagtacatggacaagtccggcccgctgggcgattacgtgtacgagcccgagccgagcctcgaggacgtggacgagctcgacgcgctcgccaagctcaacgccatcgcgcgagccgacccggacatcatgaaggaggtcggtgagacacagcgcgcggccgcagctgcctcgggggcggacgttgaagttgaagttgaaggggatgggcaagtgcaacacgagctggcggtcaacgactacaactttctgttgcgcgtgtatgctgtcaagggcctgtataaggaggccaacgcgctcttaaccaggatggagaagaacctcgagcccattgccgcggacaagaccgtggtaccggttaagccctcggactgcacggagctggcgctcatggacgcgctggagagcgtgccccacgtgatcccgcccaacgccaagtcgtatatgctgtacgcgacagctttaggagtcgacggccaggcggcgcacgctgtgcgcgtcattgggcgcatgaaggagcgtggagtgctgccggacgtgtcagtttacaacgccgtcatgcgcgcgtgctccaaggctgggcgcgtgtcctgggcgtacaatgtcatggagaagatgcaggtggcggggctcgtgccggaccgcgcgtcgtttactattctcatgaacgcggctattgccgagggggacctggacaaggcctttgagaccttccacttgatgcggacgcacgtggcggagccggacgagatcgccttcagctgtctcatcaacggattcgcgcgcgaaggccgcgtggagcgcgcgctcaacttgctcgaggatctgctggagtgcggtcttacgccgtccctggtgacgtttaacacgctgatgaacgcgtgcgccaagtcgcactactacgcgcacaaggccatcgacttttactacgagatgcaggagctgtacgactacgtgccggacctgtactcgtacacgacggtgctgcacgcgtgtgccaagcacggcgactttatccaggcggagcagatcatccgacacatggagcgtcaccacgtgcccatgaccgagttcgtgtacaacacgctcttcaacgtgtacgcgcgcgcgcagatcaggtccattgtggataaggccccgcgcaaccagaaggcgcctcccccgccagagccgatctaccaggagccgctcgagtgggatgatgagggcaacgaggtggacctaacgcgcccgggcaaggagactttttcgctgaagaacgccaattacgacggacgctttgacgaagatggagaggaggaggaaggggagagctacaagctgagtccggaggccctcgcgcaggtggaggagctgcggaagaaggacaaggccgatcacgaggagatgctggcggagacgacggacctggtcaagacggagcggagtatggaggtttacggcgaggaggacgaccatctcttcgctgacagcgaagaatcgctggactttgagctcacgccgatggacctgcaggactttggcaagttccagacgctcaacatcaagcgcgcggaagtgcggttccacgagatgaccttcgagaagggcctcaagccgtccctcatcacgctcaactccatgctggcggtgtattcgaacgcgctgcgtctacgctcggcagaggtcttcctggacgagacgttctccaagttcgagctcaagcccaacaagttctcgtaccgcagcatgatgcagatgtacgtgcgtgccaagcggacaactcaagccgagaagctgctggagcgtgtgcgttcggagattgagaacggcgacctggagcccgacgaggtaactttcggcttcttggtggaccactacgccaggaagcgcctgatgcgccgcgcgctcaacacgctcgaggacgccgatgcgctgggcttgcagctgcaggagaagcacctgaagaagatccgcgcgctcaccgagcgctacggcgtgttcaccgacctcattccggaggacccgaacgccgtactgctcgcgggtacgcgccacaagctcatggagaagcgcaaggtgcgcgcgcaggttttggagtacaaccgcaagatcggcaagcgctatttgctgcctgacactgtctaagcagtgcgggctgcacggtaagtagatgcatatagaggaatacacaacaaaccaatttgccaggacaatagctagttatcgtgacacagggactgcaagagctgtgatgttggaatgctgtttgatctagctcaactggtcgatacctccagtacatcaccactttgctggatcgaagtcaccgcaattttggcgatgtcggggaaccctgacaaggctggattcgagttgtgcttgactgtggtcgtgtggaaggaggtgaaggacgctcgagacgacaccaaggaggttggaatgtccacgctgagccttcccgtaggcaccttgatcaaggaccccctcgacgatgcgactgacccccgattgttcgtgagagactcgcgtttgctcttgtagctgccgtggcttcttggacgcgctttctggtggatgttgagcaggatgcaggccatgatgagcaggcggttgcatattccctgagcaaactcgttcttcacgcctgcgtggtgctccagaagggagaacggaacttcatggagagcgaacgcgctgtagagcgctaactcgagctttctctcactgtacacgcgttgccagccaccagacagcgacaagtagaagaagcggaaggccaccacgaagatgagcgatacagactccaacacgttcccgatcaagtgcagtcggtcgtgcgtgctcacgcccgaagcctcgaggatagagacaaatacgtgcagccaccccaacaagatgagaacttcggcggcgcgagtcagtcgggcgatggaccgaagcttcactttgcgacctaccgcacggccgatgatggtgatctggatgaggaaagtcaactgcagactggtctcggagactccgttcaaagccagcatgacgtcgaggtcttggtggaagtatacgtgggtcatgaaggagagcagatccgcgaagaggagcaagcacacggacgtctcgccatcttgaatagtagaccaacaccaagtattcaaacatccaagcgtccagcaccaacataagcgggaggaataacgatctggagatggagtccatgccctcttgagtgaaggccatggccgggcagggaacacaaattataaaacgctctttctgtccaacgccgtcgaaatgaagaaatggtcagtgtgtgaccctcccaggaatggagagggaaacgatgtgcttattcttgcaacccgaccgaggaatttgtaaaactaagatcgtcctggttctaataactccgtcagtccgtgtaggcgatgaacagcatcgcagtttttcgtgctacgaatagattcggcgctgcgacgctgcttacaggaatctccttccagctaaactcagaacagaaatactaaaaccacagactggcgtgaatagaatgcatactgtgtcctatgcggttcagctctattgcactacgtctactactcaagtatgttatttgtctgtccacgttgcgaaaacactcagcaaatactgaataacacctaccaggcttgtatgctatcgattgggagaaagatttttgtggagataacccagcacgaatacgctaacattgttagaagagtcgcgggcataaaccatttttcgtgggttttatttttcctctcctgaagtggtaactttcggttgactctcggccctttcggagatcaccgcaatttttgagatatcagggaatggctggccggaactgcgccttgggacaatcttcatcaaagttccacttgagtaggagatggctcgtgattcttgagtatcggtatttgctttcggctttaggaaggaccctcgcgccgacgtaaatgacccaaggatggagctcctcttgctcttgaagacggcggagctgccaccgctgggaactgccttcttgcggatgttctgcaaaatacacgccgcgagtaccacgcggttgcaaagtccctgcgcgaactcccacgtgacgccagtatggtgctcaagcagcatgaacgggaactcgtggatggcgaagcatgtgtacagaaggatctcgaacttgcgctccgttatcagtcgacggcagccgcgagagagcgacaagtagtagaagtgaaacaccagcacgaacaccagcgagatggtctcgaggatattgccgagcaagtggattgtgcccctacttctcacaccagttatctccagcaaagaagcgagcacttgaagacaccccagcacgactaaagcctccgcaatataagtgagccagcgaatggaccgaagcttgaccttgacacaaacatcgcgaccgatgatagtgatctggatgatgaatgtcagttggaggcacgtctcggacacagtgttggccatggatattgtgtcgtggtcgtcgtacacatacaagtgcgttgcaaagccaataaaggaggccagcacgagaagccatactcggaattccttccgacgtgggtaatacaccaacacgaggtgctggaaggtccacgcgtcgagcacaaggatgaatgggttgaacaattttcgcgagatatcgtccatgtcgtgctgggtgaccattgttttgaccttgtgcctcttgcctggacgaagtagtaatgctgctttgaccttcaagatagcgacgaacttgacttgacgcacaacgcgatcagatgaagcggacgttggcgaacttagaacaccgtgaatagcctcggtagttgaagcgaccacggcaacgcaaagccaagtggctactgagctgttttatcacctcttgcttcttgcgggtaaacccgtaaaaagtacgatcagatacttcaattctagcacccttgactctgaatagctacttggaattccaagaagttcgccaaacgtgtgaatcaacggttcccattaactacggcagaaatgtatgttgccgtggttttataaaataattgcacttcgcagtataatataaggctgcaaacagcaaatgaaaaatatatatgcaaccttatcgtacgcgatctagcagctggaaagctgacaacagcaagcttaagtagccctcgatagttgacgtacgctgtatttggtcctcaaaaatcgtaaaaagtgatgtgtgttcgcgtacagcggaactctgtacacggaaactcccatttccatccatccagcaagttgcaaaagctacctgagcacgccaagcaccagaagcaaattgccaccacaaacactaatgacatttttcagaaaaaaaagaagttagcctggcaaaataatcatttcaggaatatacttcaacctcggatatcgatgtcgagaccgacgtcagctgtagatatactacgtttgggcgcggcttgatcatcatcgaagaatagacgtggctggcaagaccaagatcaagaaaaaaaggttgccaacagtgaataatctcgaaaaattccatccaggcgcgagaaatacgtaggtcaacacaaggtactggcacgtccaagcatccaggaccagcatggccgtgcggaagaactgccatgcacgccaatgcagtcgggttttcttgtgcggccctcgtggcccgcgaactctccagctgcaccgacacgaatttggagcaggcaaaaataggtgttgctccgctgtctcgctactgaagccgagacattcgaggccaattttgaaatagtttgccgttttaagcgttggtctgtgaccagagtgcatgagagttgcgcgtgcgtgggaagagaggtgcctagttctggctgtcgatcgtagcacaaaatttcgctatgaattgtgagcattgtggtatctacttgttctatgttggagacaattccttggaatgatttcttacacatcggatatcaatactctactcacgaattgatcggtcggttgtgctaaccacaacgcgataggacagtcttccactgacagctaccttggtaatgtctgggaatgtaggggtttctcgacgtgagaacagcttcctggtcagattcttgatactggacacccggcctcgagctgctaccacggaagagtctctcttgctattacccgtgtgacttgtacgactattccctcgaattttgtggcgcagattgaggagaatacacgtaacgaccaacaagcggttgactattccctgtgggaactcccacaatacacccgttttttgctcgagtatcgcgaacgggagctcgtgcaggacaagcagcacgtacatgagaatctccagcttgcgcttggtcaatacattgcgaaaatcgcccgagagtgacaggtagaagaagcggaatacgagccctctttcaacgcgaaagagcgcgtgagacggtggaaactgatcgagtggttacatcgtgacatcggccccgctaatatcagtgacaagccccgaagtggaatcatgctggagctggtgatcaacggtcgactagatgcagtgaagtggttctacacagagtactcgaagaacctggcgatcaacttgttttggaactatgatgaggatgaggacacatacttcagcgtacttgatgctgcagcagaacacggacacttgggtatcgtgaagtatctggataaggtgtgtaaactggtgacacctgaagagaaagccaagcgtgaggagctctctaacattgactacagtgatcctgattgggagtttgaggtggaacagtcgagcgtgccaggatgcacgactgctgccatggacaaagccgccagcaacggacacttggacgtagtttgctaccttcacaacaacaggactgaaggctgcacgacggaggcgatggatgcagctgctagccatggacatctcgacgtcgtgtgctggcttcacaatcaccgaatggaaggttgtacagaggatgcgatggatgaggcagcacttggaggctatctctctgtggttcagtggcttcacagaaaccgaaaagaaggctgttcatctgtcgcgatggactttgcagcgatgcgggggcacctggatgtggttgaatggctgcatgaccacagatccgaaggctgtactacgcatgccatggttcatgcagcgaggcaaggacacctacacgtcgtcgagtggttgcatgataatcggagcgaaggctgcacttctgaggctatggagctcgctgcaaggggaggccacctacacgtcgtcaaatggcttcatgaacaccgggatgaaggctgcacgacagacgcaatggatggggcggcagcctctggccacctcgaagtcgtcaagtggctacacagcaatcggtcagaaggtagcacgaccagcgccatggacgatgctgcgaggaatggccacttatcagttgttcggtggctccatgagaatcgtcgtgagggttgcacagcgctggcaataggcaacgcagctcttggccgacacttcgaggtcatgctgctgctgcaccgggtgcgagatgaaggttgcaaggtagtaatgacgaaagacgatctgctcatgtccgagatcttccagtggctgatggtccactaccgcgatgcgatgtttgcggggttacaggcagcgtagatttcatgtggtagtctaggatgcatgtaccgtactcacaaaataaatgggttgcgacgttcttggtgtaaacctcactccatgcctgcgccgaaacatacctacacactaccgtactgacaaacaaataacgcaggcaacaagataacgcgagacaatacccattacgtcgtgttaggatttatatctcagaggtctacagtaccccgtttggagtcatgttgacggtcgctcgtaatcatcaattgccccagaagaagaagaaaaggttgattaactagatacagtaatctgcccgagtaaggaacgcctgatatatataaagacgcagaatatatcaattgatgttaagtcgagtatactttttcaatgtacttatttagttatttcaaaatgaactgaagagcagctttacctacgagtccggaatgattccaacagtggcgtatggtcgaagcactaacctttgaccaggcatcctcgcaccacaacagcgctgtcaaatgggtggagtgggggaggaggtcggcttgtggggcgaggtgcaaaagcaaaagtgcgagtctaccactacggtacatgtagtttgaagtctagtaagatcgctaaaagtagtgagttccagcacaaaacccagtcagttttttttctccccgtaatttactaacgagaacaatcgtagaacgttctccgcgaaagagggaaaaggaggtaattttcgacgatggaaccaataagtaccttctggtgcgaaggaggtctcctcctcacctacaagcaccacatatagcaacaccaacctcacacgcatcaaatgatcatttcaacgacaacacctctcgactgctgagagtgaaaggacgcatccgatgcagctcaagtaggtttcaagtcctctcggtattggaatagggctcttttgtgacaccgtttcatcacgccttcatttcccgcttaggtacggtaccaaaatctctccctccccttctctctcattcgagaatctgccgcctggtggaaagatggtcaagcttttctgtgctatcgttggcgtggcgggaagcgcgttctcggtgcgagtggacgagagcgactcggtggatgacttgaaggtcatgatcaaggcgaggaagcccgacacgatcaagggagaagcagacaagctgcagctcttcctggcgaaggaggacgagggccgcggcccgtggctgacgcatcttgacgtgctggaaggtgtgagtgacactagtggctacaaacatctacagtttacagacgcggagttacgagatgttggctggatggtggagatctgggcgaagtgagtcgtgcagaaaaagctgctggaaaaggtcacgtccacgtgctggtggtggttccggagggggcagttggttcagcgagcgagacttccaggatggatcaagtggtccaagaggtgcacgaaattcatgcgcaaactgtgctgaccaagcgcaagacatatgtccactcgaaggtgggttcgaccgagtacaaggaacttctggacgccttcaacattaaggtgcaacctgtgcgtaaagctgctgctaagtggggtgaagtcaaggggttcacatgggacatgaaactcagcgaggagaagcagaaagatgaatatcgcgagtatgttgacagcaacattggcgagcttctccaggaggagaagctttgcgtgttcggtgtggaaaatacgacagatattctccgagttgttgtcaacggctccaacattgagctccggggtcgcaccgctcttctcatactcagtgatatcgtcatggagagcgcggattatgcgctggacttgcctgaagtgaagatgctgattgaagtgaagaaaaaggttgaaagacaatctgtcttccaggcgatgtcagagctaattgctctggctctgcttgccgacgacccagtggttgcactgcttactgacttcaacggcgattggcgattcttctgggtcgccgggaaggaaaacaataccacttgcgtcaacaaagtgaacattacgaatccaggtgaagctttcgagttgatcaggcagctactgaagcctacggatatcatgaccccagtgcttcaagaccctgtgaagcgccagaagttatcccgggtgttgccgtccatcagcgaggccagtgaaagtggcgggattcgtgagagcatcgaacgatactatgacatcgccagttgtttaggccccgacttggacatggcgcgtgctgtggctagacatgtcactcgatctattcccacgttgagttatttcagctaattcttgctttggcatgctgcattaataatttttttattctgataatataaagttaataatatacaaagatgacttactctcctgaacaataccaagctaacaaagagcgcatgaaggcagctcaaaagcgatactacttgaagacgagagaaattcgtatcgctaagcagaaggagtacgaagcgaggaatcgtgagcatattcgtgcccaaaagcgtaaatcctatgcagcgaagaagcagtgcgaacctaacagtgaaaccgaacttagctaattaattaattaatttttttgaattttgtatcagggtagatataaaggcgatctattctgacataagatccaaaaattataaagtcgatctatcctgatattatatagtcggatatatataggaatatgtttgcatacgagttagaaggactaaagcgattaaatattcacccaatcaaatgggggagtagctatcgagtcaagatccggggtaaaaccggtagaatgacatatattagcaatctatcgcgccccagcaatcagaacacgagcgagacggactccagcacattcccgaagatatgaaaggcttcacccgagatcattcctgccgcgtccagtatgcacacaagcacattcagccacccgaccaggataaacccctccgcgacgtacgtgaaccagaggatagagcggagtttgaccttgacggtgactgcgcggccaatgatagtgatctggatgatgaacgtgagctgcaaactcgtctcggagatgtcgttcatcgccagcagcatgttgaggtcttcgtggaagtagagctgcgtggcgaagcagaggaaggaagccagtagcagcatgcacactcgaatctcccgtgttttggcgtagtacactgataacaggtactggaacacccacgcgtccaagaccaggatgatagggagaaagatcgctcgcgcggcggagtccatgccttcttgggtgatcgccatgcctagcctaacggggatgtggaacttgcaagaccttgtgaagcgtgtactcgtaaataaggctgtggacacttgggagttacatccatgacaacctggctccgtgaatagcgagaataggcccaccgctcgaaataccaactcgacgccacaccttcacctccagtttcttcctgaatcaggaatcctgatagcaacggcatcaggcagccgattaaatttttcggtcctcatcagatccaagctcttgtcttatctgtaacgagcctcttgcaatcaacctccagcaaccaaaaccacatttcgggtcggaacttggatacatattcccgtaacgatgagatcaacagcaatgtccatcaaacgatgaggtgaatgagctgtacatgtacactcggcgagagaacgtcacggctcagatatccccagccggtgaagtgtgactgctccgccactgacagcaaaccacgcctcgagggtcacctcaacgaagtgagcgtgatgtacacttgccctccgctctggtttcctgcagaccgatcatgtgaaacgcgaaaaaagcgcagtgaatctccgctcgcagcaagcagaagtgtagaattattgctaggagcgtttgcttggtaagttaatgtctcgccgctgttcgtcgactcctgtcgtgtttgtcctgttgaacgtccccatcgaaatgacccccacgtcaagttgtggtccgacgactagaacattgccacgatccgatccgccctccgcgttgaagccagcttcaatgcacgaggagccggtggacgcggccccatcccgagatgccccgatggataggccggtcttttcttgtcgaggtccgcttcgtcactttgagcttggctccatacatttgtcccgtccgctgcgttacagcacccctttggtcgcatggtctctgctatcgcaacaaacggtctcggtttcccggggctttgcttcgtagaagctcgagaggaagacgaagatggtgtccgtgcaagatccaagtggccgcccttgactcgacagggcagggtccggtgtgagcagactctggctctgcttggtccgactcgctcgactgccgggcacttaagctttctcagagattaacgcactcgtaatagctccggacagggcgagacgagatgtgggcgtccagcagcatgatcagcgagagtggctgcagctcgaggggcgtgcggctcgacgccgaccccaagcagaggcgactaaccattgcgcgcgggacggacgacatggactcttctgtccagctatcggaccaggagatcgtcacggacctgttggcgacgctacccaagctcaaagctgccgtggaggaccacgagaacagggctccgaactggctgcggaagtcgaaacacggtgactccgtcgagatctacgaactgttgccgactcgcgacggtaagggcgacgacatggatatcgtccactcagtggtggcgacgatcgagattgaatgccatttgaacgaagtacttaacgtgctcacgagccacaagacgaaccacgatctggaggcatcgatgcgggccattattccgaagaagaaactccgacagggtgaggtactgcttcagcctcacgctacgacgctggacggcgctccgatcaggagaactcgagccacggagaagtcctcgcgtggtgggaaagcggtgagattcgatgatattccggaggatgaggagcaggaggacgaggagcggaaggtgctcgtgagtgtcagcatgacgcgcttcaagtccaaacgcaggttggacttgcaggggcgactgcgcaaccgccaccagcgtctgcagaagctctgcctcgcgacgctcacgcaccagttcattggtaaacagcgcgcagttcacatcatcaagacgctccctcgatccgttcacgatcagcttgctccgatcgaggagaagcaccagagccgttcggtgctaggcagcggcctgcgcggccttgaccatatctcaatcggcttcgacatccaaactaggactgtccactgcatcggcgcgcgcggtgcggcgcagtcgacgaggattattgcacacgggtacgcgtccgtcacagccccggaaaacttcggccagcagcagacgaagaccatgaggaattacagcccttcggaactggcccagtaccgctcagctcatgtgaacgctgaggccaagcacgtgattgaactattaacaacgtcgctgcttcaattcgagcgcgtgattcgccgccgacgcctcggtctgcagacattcatcaagatgaaggctagtagcagcgatcggcagggtttccaggcgtgtgaggtgtgcaacaagggcttctcgctgcttcgacgcgaattcggctgccaactgtgcggccacgtgtgctgcagcgactgctccaagctctacgaggtggagcaggtcgtcggagaaatcgccaagaagcggctgtgcgtgcgctgcatcaccaacgtcgactcgtgcatcttcgaggacgaggacttcatcgctgcgctgggtccggcggtgatcgacgacggggaggactcggactacgactacgacttcgacgaggacgaagagaaatatgacttcgaccgccgcggtgagaacgacacgtacgcgagtcttggatccaccgtggcttgctccgaggttgacagtggaggcagtcccgacgacgtgtccgcggagctgtaccctgacaacgtgctagagcgctcgatggcgctgcagacgctcgatcggctggtgaactcgcaggtcaacgccaaagggaagcagacgctgttcgagcggtctcgcctcacgcagtcgcagttgtaccagtctcagctggcccagtctcgcctcacgcagtcgcaactgagcaactcgcagtcgaacttccagcagtctcagctcactcagagccagctcagcaactcgcagtctcgactcacgcagagtcagctgagcagctcgcagtccagcttccagaagtcccgactgacccaaagccaactcagcaactcgcagtcgcagtttgaccactcgcagttcaaccagtcccgcctgaagcaggcgcaattcgacgagtccatcgtggcgcagctccgcgccgacgtcgaggaccacctgaagcgaacactgcgagccacgctacgcaacaccaagaggggcttcgctggcgccgacgagtcgatgttctccatcgcgccgctggagcgcgactatcagctcgagtttgacggcagccagaccatgtcccccgcacacccgctgccgcccaagccgctgcccgtgcaggagcggaggagactcgagtacgtcatcggctccggcgcgctgagtccgacgtacgaccgcagtgcactcaacatgctgggccagatcgctgcggctcacctggactgccccatcgggtacatcaccatgatcgaccagtctacgcagtacgtggtggggctgcaccccggcaacgccatcggcatgtccattccccgagaggagtccatgtgctcgtacaccatttaccacgagcgtccgctggtggtcaagaacgcattgaacgacgtccgcttcagccacatgggcttcgtgagccagactggactgcggttctacgcgggcttccccatccgcgcgcctgacagcgccgtggtggccacgatctgcgcggccgactataagccgcacaagtacatctcggccaagcagtacgccgagatggaggcgctggccgaattggccagcacgctcattatcactcccgacatcgaagtcaaggcggccaagcgggagccgcagcaagcgttcccgcggtggtaacaaggctttatgcgttcgatgtcgaggcagtacacgcgttgtagtagtacgcactatctaaatggaatctaaatgtgcttagtgagaacgcagttacccgtaagcttaccttcgatatgcaagctgctgtacgtgtgtcaatgcattgagcagtcacgcttcacttgctgggggtatctgggccgtgacgttctcccaccgagtacagcacattcacttcatcttgaatctcatacttgtacttgcgataaattcaagttcaagaggttcgtttcggataaaactggggtgtggacaattggagaagcgagaggtgaagctgtgacatcgacttgtatttcgagcggtctatttctcgcttttcgtggagcgacgaactcgtcgtggatgaccgtaacgagaggcatacacacttcaccgggtcgtgcaagttcctcaccactccagatcgtcaggctgcagagagtgatatacttgacaaacgacggcaaccactcacgaaggtatggagtccacctcgcgagcgcgattatcctggtctaaggtgcttgtgtgttctagagccttatatcaaaagacgggaagtacgactggctgttggcttcattcatttgctgcacctcttagctgtacttccacatgacctcaacatgctgtggcgatgggcgacgcgtccataacgggtttgaagccccctttcaacatccagatcatgattattggccgcacagtcaaagtataagaaaatcatttctacaatcggctccgacatacgaacgagtatatggatgaatatagtagtttttccgacagatagcttagtaggattgtacagaacaggaaatatatgacggcctgaccaatcacacagtcgctattcactattttcatccaatcaaatcacacagggataggtttttagttccgacagcttctgacaaatatttgtcggaagcgagacgcaaatatgtatatgcacatagtgaaatacagtcaagtacgtacttttcaaatatgctcatgattacaacaactaggcagaaacctattttaggcccggagctctagtcagtggtggtcctccgcacatacacacataggcactttgaaacggcagaagcgccagacaaagatcagcatgagtctctctgcactcatccctgcgaacacgcaaaaagcgcgcaccacagggattggtgcttttgagcgcatgctagaagcagagaatgtgtctatgaatgtcattcaagcctgtgtgcgtggtgacagttctggcaagagcctttctgccattatggaccgctttggctactacctcgccacgtatgaaggtaagaaaggtaagttggcgtctaacacagccatttcatactttagaaacgttatgctttgatttttcgatgagcatcctcatcttcgggttcctacagagttaaacctgctaaagcaaggcaagactttggaaaaacattgcttgaaacgggacaatgggggatttactaacaaagctccgccttgcacgaaggcggatttaaggtcactaattcactatgtctacagcacggcgtctgtcgccaccgactacgaagatgcagcgctcgcgtgcctcatgtggcactgttttgggcgctcctcggatctcggctatatcagcaagcagcacatcacagtgtcagcggacaacgttttctacgtacgcatgcttcgtgtgaaagctaccgaagagcaaggcctccccctcgtacctgaccgcgacgacttcctcaccttccccctgcacacgctggccgttgctctggtgatgcaggaggcgccctgtgtgtcgctgctgagtcaacttcccgctctcgctaccaccgctggaacctcgctcgacgcaggtgcgcctctgcacgaggtgctgcgggtcagcgtcgcggatagcagcgacaccgcggcggcctcggaagcgtccctgtcgccgcccagcaccgcttccctgctccccacaccaagtccgcccagctccaacccgtcgcaagccaccaccgcctccctgccagctcagctcacagcttcaagtcccgcgaggagcagcctcggccgcggtgaggacggagtccaagcgtatgtcaaccgctttttgaagcgggtggctgaacccgccggtgccaccagcaacctgacctcgcactcctttcgccgaggaggtgcccagcacgccaacggagacgagcggctggcagcgcagtggatctttgaccgcgggtcatgggatatgacccgcacgaacaaaggctttgtttatgtcttcaacaccccccgcgaagaccgaaaagtcgcccgagtgctgaggggctggagcgccgacgaaaccccggtcattgcggacgttacagcgctggaccatgggacgcaggaacgcctggcgcgcttggaggagctgctgttcggttcctgcattggactggcagacgcaaagctacacgtaagtcgcaaggttatcggagtgctgacggcgtaccagatcaagtatttcccgcaagtgaaggcgctggcgcccgacacgctgttcgttgcgcgtatcgaggaatgcttgggagcggctgatatcccggtcgccgacatgctgtcttggtccatggcaatcaatacgtctgctgcttcgagtcctgaacaagcacacgaaaagtcggaagcaaagagcaactgctgtcatgctgggtgtcaccatttggctgtcattagcgagcttatcgagagcaatcggctcatgtctgcgcgcctcctcgcactggagacgatcatcctaaagcaagcgccacctgtgaagcgtattgaagaagcataagaagagcaagcgtcgtcagagcaagcgccacccgcaaagcgaagaaagaaagctgctacaaacctgtcctcgctgtggttcgagtggtacacgagaccgccccgtgtctgggactcgagcgaccgccagaagaagtccgactaccgcctgggcgttgcgtacatgaagctctttcttgacggcggattcgtgctgcgcgaggatgctgtcgacttcaaagatcttgtcttcgaagtaggaaaacgagcggaagcagtggtccttaggttcttgagcgaacagggatcccgagcaaaaggagctggcagcgtgctgcgcgagatgcgcaagcttcatcggtctggtgccctcgacagtcgcatcgtggcgtatcaaagccacctcgccctggaaaggatcgtcgacccagcgccggctgcaacccaaaacatactacaagtcgtcggacacgtgtaaggcacaaagttcggggcaaatacatatattcatgaacaaatacaagacagttagcttacgaacgcgcagatcaaggccatgaccatcctgccaaccatcgcccagagaccgtcgggcactcagtgcattgctctccatccgctcgtcgccgcttgcccggacccaaacactgtacaccttggaaggctcccatcaatcgtgattggcgacggcgggcttcgatcccgctcctcagggcaagccctgcgctgatccattgagcttcgtcgtcgagggtggagcctccggcttggcttgcggtctgggcggttcggcttaaaaaatctagactgaagccgcggggcctctgtcggcgttgcctccgagagcttgactgcgtggcgcttttctattggcttaataaaacctcattgaggtttttaaacgagtggctctggaagagagggtcactcttgtgaagtgtaaatatcactgtttaaagacaatcaacccaaatagtggacccaccacaggatcctggctctcattaatgaacttgccacctcgagagcacattgctccgagtcgattttgcgcctagatgcaaattgccgtttttctcggcccacaggcctcaagagggcctctagtagaggcgatttcctcgcggctgtgagcaccgcatgaaagctgacaagaatcggtcaaacggccccctaatcctaatttaccgtacataatatctaatttccgatttttaactatttccgattttgcactggctttgaccaattgcctacttgtcggaatatgtagggaagtcggaaccgtcatgatacaccaaatcctcgacgggtaaaaaaccccgggtttgcaccgcattgttgatcgagtacaatccacagagagaatatctctcggatgtaccgctctgattctcacacattggaccgcccctagtccgtctacccacaatggattgcatctctgttcgtggaacgtctagcaaatcgccgggcgtgaagagagacgcgcaccaaaaaaaactccccactcttacttagcactgacgtgaaatcgctagcaaatcgccggcggggtgagcgcaaaagcaaaagtgagaaggactgcatcgctgcatcgaaggcgacgagcgctaaccaaccgtgtacatttcaatgcttttaatacagtacagccagatgaactctcgaaaaatgagaaatgtattacgtttttgtatgttacgcagcgctaatgctgctgttttaataaccaacatgcaaacgcttaagttggtaatagcggcagaattgcaggtgtcaggccgtaacagcctgacacctgcaatccaggatttgctctggcactgttggagcagtggcgcatttgattgctatacgcctgggcaccatgcccgatgtgcatgatgtgtctgcttattttttagccaatcccagcttgtaggcactctgtcggccgatgtcggcaccgtcatggtatggatgaatatagtggtctttccgactgataagcgagcaggattgtttcaggcttgtcttcacctgaattacagcctatcatatcgcctggtgtggatattttagccaatcgtctgcattagggttaggtgaacgcgtttcaacactttccgacaaatattggtcggaagactggcctaaatatgtatatgcgtatacaaaaatcaagtacagaaaatactttttaaatagttttgccgttctgacaactaggattatgtcctagaataggacggagtgaagttttgattggtgttcatttgaagatggcgatcaagtccgagagatgaagcccccacatgcacgcagtcgcggcgaagggcaaggcaagatgaccatgacggcgagcgcgttaagcgttccactgccacaacgctagctctacacgcatgaagcatccgtcgacgtggcgtcacacgcagccgtcggaggacgggtgagcttgctgcagtacgccgaggttagctgaggtggtgctgagcgggggcagctacgcgagtgcggaggatacggtgagcgagatgatcaagcgtaggaaggagctgcagaaggctttcgcggctggcgacgtggcgaagctcatgggcgcgcgccgccgcatggagggtcacgaacgcgttcacacccgcggaggactgcgaggctccttgccaagggcacgcacggagcaacagcgcatcgccgctgtccgcccatgatctgtaccttggagctggacacgccggcgctgcagctgtctgtgctcgttcgagcaggggcatgctccgcgtcatggacgacctcctcgtgaccacccagacgctggacccgctgtcgcacaagttcctgccgcacgaggctgacgatctgaacgagaagctgtcgaaggaggtgaaggtgatgaaggcgacggtgacgtcgtgcccggccggctaggctgcaggaggtgaaccctatctgcacggctgtcgtgtgggcacatcacggaggacagctcggtcacctgtacatcatgaccccgctactcgaatcgttcaaggtgctgcaccagtaggtcaagatggtgaagtctctgccgcgcaggatcggattgccaatagtggcagactaaaaggcggaagtggtgatcgcggtgctgcatgcctcacagctggcacaatagctgaggaggcggtgatcgtagattggtgatcaaggtgatcaataatatatgtagctacccttgcactttatcatcacctaacttttattgcatgtagctgcaagtaccctgccattttcttcttcagttaccttttttactcacggtaactttagtttggtcaataaatcctagatgtcggaatatgtagggaagtcggaaccgtcgcgatatggcgagtgcactgctcacaatcatcatagttttgtgtacatataaccaacgtgaacttggcacatgaattatacaattcgagtggaaagtcaaaggttagaccaacgctggaaacagcgaactatttcaaactcgatctcgaaaactacgaccttattagccaaactattacgcacgccgaaaggagtggcgagtgacgctcctcttggtcgcctcttacgttggctttgcaacccacttgtatgtgtacgacgaccacgacacaatgtccatggccaacactgtgtccgagacgtgtctccaactgacattcaccattcagatcaccattatcggccgcgatgtttgtgtcaaggtcaagcttcggtccattcgctggctcacttatattgcggaggctttagtcgtgctggggtgtcttcaagtgctcgcttctttgctggagataactggtgtgagaagtaggggcacaatccacttgctcggcaatatcctcgagaccatctcgctggtgttcgtgctggtgtttcagttctactacttgtcgctctctcgcggctgccgtcgactgataacggagcgcaagttcgagatccttccgttcacgtgcttcgccatccacgagttcccgttcatgttgcttgagcaccatactggcgtcgcgtgggagttcgcgcagggagtttgcaaccgcatggtacacgcggcgtgtattttgcagaacatccgcaagaaggcagttcccagcggtggcagctccgccgtttttaagagcaagaggagctccatcaccacctcgcttgcgtcgtttgcatcggcaagggccccttgccgatgctgcgggcaaaatttaatcattgcattattgccattaattgctgccaattcgtgcacgaacctgctccaccgtgttgacgtcccacaagtcgcggttgtactgcagacacatcagcatctcgagcatggtgggggagagactcttccgcacgtctgtgagcaccagcttcgccgccgaaaaaaagcgctcgtactcgttggacgtcggcggcacgtaggcgacgtccacgtattgcgagcgcctcggtgccttcctcttcttgaacgccgccttgacgatagagctgttgccgtcctcccgcgctggtgcccattcaagggtcgtcgatctaaactcggcacacgccgaccgttccgcggccgtcaacgcctcttcgcgctgaagcttgacgaggcccagttctaaatgcgggttgttgacgatcggagccgttgcggccagtcgtgacttgagtgcagggtactccttcaccccctggtcaaaaagacggtgcacagcagacaaagttagcgtagacctctgtagctctttgtgactccctcgaacttctccaggtccttctccaacgccctggctcgctcgtgctcggcgcgccgcagcaaaagcggctgtacttcgtacttgaccagaaggtcatggcccagcttgattatggcgggctggagcttcacatagcgcgccaccatctcgtacgtgctcgaccacctggtgtcgtacctcaacagaggcgacagatgggagacgcggcgaagcagagcgcggcccttgatcgtccggagcttggtcatcagcgcgtgcaccttcgcaatgagctcgtcctcggtcttgaggaagtccttcaccgccaaattgaatctgtggctagcacatccaatgaaggggatagccccttccttccggccgatgcattggttcacagagcagttgtctcccaccatgaacttcaccgcgctccatggcttgttatagcgagacagcgtgtcagcgatcaggtcgtactgactctgcgcacccatgtcttcctcgacctctactggagcgaatgttaacagcaggaagcggcgcgatgagcactcgagatcgtcatagtactcgttgtcagcgccgccaccggtaataccggtactgtcgctgccgaataccgcgaatatcgcgatgtagtgacgaccaccactggtccacccgtctagaacgaggccgaacgatgcagggagctcgcgagcgacgcgcagctctagcagctcgaaaatcagcacgatgtacttggagagggtgtcctccgacacgagagagagggaggcgttgaggcgcgtgagccgccgctctacgaacgcaaacgggaggcggtcgcagacgacccactcgagccagcggtataggtccctggtccgtgtgctgacgaggtgtaggcgcagcgggttctggcggcgtgacgcctcctgggcctctagctcgtagttgtcgtggttgcgccgcaggtggctcagcaggttcgtgtagccattgcccttcttgtactgcttgtcgcaggatgtacagttgtagaagccgttgccgacatcggtgaaaagcatggagcagatttggctgctcgtgaggaccatggtggacacgtggggcgaggggcttgggctgtgaggggtgaagaaagcaaatttgctgctgaaggagcctccgctgcgagtggtgcggtgaagtggtgccagatcggcgagtggttggtggtggactcttcggcggacactggtggctgcaacgaactccatctgagcaattcaaatacgaattgtgtgtaataaaaaataaattgagggtctaaaattaatcattgaattaaagtattcgaatgtatttttatgagtattattttttcgggtgccttggcaaggggatcgttcctgaagccgaaagaaaataccgaagaacagcaatcccctccacccctcgcacgaagcgggtctttgccgaagctcgtttcaaggcgcagttggcgccaagccaccccccgggggtcccccgatatcgcgaaaattgcggtgatctccgaaagggttgagagtcaaccgaaagttaccacaaccagggaccgggatagcattaagatactgaattgagtgcgctcttctatccatgccaatggtattcctaacttttcggtgcaaatggctacatccacttcaacttgagggctacaccaaagttactgggttacacaaaagtatgtaccctcgcaataccccactattaatttcggacacttgatcatgtcggaggcggcgcagctcgacgccttcctggcggccatgacgcagtactcgccgacggtgccggaggagctggtcgagttctacctgcagcaggcgggcttcgtcaccaacgacgtgcgcatgtgcgtactgtaaccctgcgcgccttctctctaaaacgcaccctaacgactcctaattaaccgcttaattaatgctacagcacgcggctgatctccctggcggcccacaagctcctgctggacgtgacccacgacgccatgcagtacctgcgcatccgctcgcagtcggcgtcgtcggcgtcatccagcgcggcgctggccgccgtgcagagcgacggcgcctctcccacaggcagccgggctgtgttgactatggaggacatagcagccagcctaaaggagtacggcgtcaatatctgcaggcccgagtacgtcagcgacgtggcggaggaccccgcggcctaaaaaatagaacgagatacgctctcattctaagacaaaatggtgtacttttaggtcggtaggttgagtttttgaggatgtttttggtggtcgagtcactttgggtgagctttgggctctacagctcttcgtgctcgtccacgggcacctccttctcgacgactctgcgcttcttgcccttcttcttcttgtccttcttgagatcggcgcccgcgttcttgacaatgtcgtccatgaagttggtcttctgcgggtcagtcttgagcgccttggggtacttcttgagcagccgcaggaacatggtaggctcctggcccttgtacttcttgagcagcgcgtcgatggcctcgtcctcgagctcctcctgcggcgcgccattctcctcgaggaagtactcgaggcgctcgcgtgtggcagcagccgcgttctccgtcggcacgcactcacacgcctccttctgggcctcctggtaggccgggcaggcgatcatctagcagcagcgataccgtataacgtcagtatcctccgcaggaattaaagagtatagtgtgggtactgtacgcacattggcgccgatgtagaagatcttggcggtcgagaagcactcgtcgcgcttggccgggtctctgatggccttgcactgggacttcatgcacttctgcagccgcttctcgcagttggccttgggcatgccgcatatgctgtagcactgcaaccatcaagaaaaaaaaggtttaggatacatgtacagatcaatcctagttttgagcaacaatgctaggctggagcttacggcgtcgtgccagttgcagcactcctggaagtccgtggacgtggagatgggcatgccggacgtgccgcagccattggccgtgaactcaaagtccctgcgaacggggcaaatcaattaattgaggttagaacggagagtgtaaccatgttgatgatggctgcttcacgcacttggctggggtcaccgcgcgcttggggcggcacgtgaagggctcgcacggctggctgtagctggtgaggtccgggaagtcgatggacgcggccgcgcagcccagcgacagcgcgcacgagagcagcagcgagcgggacagtaccatcgccgatccgtggggtcgtgaagtgaacaggtccaagccgtcctgccacgtggttcagcctcgtgcaacttctaggccctcaggatagtgtactttacaccaggtgcaacactgtgaagttgtgcaacataaagttgtaattcatgttgcacaactgcgattgcagctactgtagcttttcgaactcctttgcccctgtgtggtgcaggttgagtggcaggtgtactgtatgatgtacaagctggcgactcgggcatacatgtaccatccaagcatcgcgtttcccccaactcgagccggtaaacactgcgtctgcgtcaacctgcgactttgcatgcacgaagtgttacaagcaccgcattctactctgtcgtgtctcgcgacgacacgtgcgggaacaacctcaactcgccaaacaagcccgtctcaagcatgtcaagctttggagggctcaggctgagccgctcagcccgcgatttcgcggtgtcgacagtagaggacctgcagcagattctgctcgtactgtggctgccccagtcgcccaccttgaaagctcaggtatcctgtctactagcgagacctgcatcgcgccatccgatcccgcttggccatttcgctagtcttccgtcttccgtcgctttggtggtctctcgtgaacatctgtcatcgaaaaaggtcgagctgtcagcgcacgccagcatcagcactcagtcgacgtatcatttcgtgtcaacgtggtcgacagcagttgctttaacgtcccgggacccgcttcacatgtcaagcatcgcacggggtccgcttgatctcgtcgagctcaccacgacacgcagttgcaaatctgaccggcaaaggcgacgtcgaagttgtggtcgactattccaacgcagcgatgagcagtcgagaccagtggagctccaaggacccgtggtgcttcccgcacacccctgataaccagacgggcagtgaatccgcggcgtccgactacgactacagcgtgaccgagtccggcacccgctccgttgcattcggtgaagtcgccaatgggttggtggtgcgcagcacgaaagatttccgacagacgctcgtgttctcggaccaggagatatgtgacgacatcctggcgacgatcccgaagctgcattcggctgtgcttagcggcttgaaaggtgcgagatggaagcgtcggactgttaaggcgggcgtgcagctagcagagatggagccgagctacgcgcctgtagacccggacgacgaccttgacatcctccacgagacggtagccaaaaccgagctgcgctgtcacttgaacgaggcgttgagtgtgctgctccaccaagacccggagacctacgacaccactatgaaggcgttgtgcggaaagaagttcaagaaaggtgaggtgctattccaccagcgcgtcgccttcggtaataattctcaagagcaagcacgagctccagtgggggagaatggcgatggtgaggccccgcagcaaggcgtgatcactgtaacttcggcgacgctgcgtcctagcgctgccttgcaacttcagctgcagtcccgtcataaacacacgcagcagctcgtgttttcgacttgtacgcaccagtaccccggcaagaaccgcgccgttcacgtgatgaagaccgtgcccaagtctgtccacgaccaggttcttcctagttcagagcgttcgtctctgcgccgtcagatcgaccacatcgccgtcggcttcgacctgcagttcaccccgcgtccaggcggcagcagtcaccagaccaccagcattttcgctcatgcgtacgcctctgatcgcccgtcgtcggccttccgcaacgaaagtggcaaacaccgagctgagtctgtgaccaagaagcgtgaggcagcgaaaacgatccacgcgtcggacttgggtcgccgtcgcgcggctttgatcaacccggaggcgaaacacgtcatgcgtgtgctcaccgagtcggtggtgcagttcgagcgcgtgattcgccgtcgccggttcggcttccagtcgttcatctacttccccaaggagtacgcggacccgctgctggagaagcgctgctcgatctgcaccaagaccttccacttcttccggcgcgacttctactgccagctatgcgggcacatggtgtgcggagactgctcgcagctctacgaggtggaggctcgcatcggagagatccgcaagaaccgctgctgcgttctctgtgtggtgcgcgtggacgcctgcaagttcgacgatgaagatttgttaccagcactggggcccattctagttgaagcaccacccgatgcctgggagagctcgatctccagctccacaactacgaccaacgaagacgatgactcggacatggacgacctcaccggccagctatgttcagaagacccggagacgcgcagtcgcgcgctggagatgcttggccggttggtggggagtcccgcgagctcagtgtcgtcctcttcgaatcgcaagctggtgaagcttccgagtagcggcagcgtacgaagccatgcaagttcaagcaggaagagaaagagcagaaagaagacgcagtcacagcgcgtacttgagagcgtggagagccacgtgacccaagagctggccaagtcgcggctgaaatacactatcgactcctgcgaggtgaacgaccgtaccagggactacaagtacgagttcgacggctcgaaagtcgcgaacgagaaccacccgctgccgcccatgcccgacgtccagaaggatgctcggcgcgtcgacttcattaagaaatccggcgcattgacccccgactacgatcgttcggcgttgaacatgatcgcgcaggtggcggccgagctgctcgcgtgtcctatcggcttcgtgtccatggtggatgacgagcagttccacgccatcggcaactacaacctccccgaggaagcgcaccacctgcctcgcaatgagaacatgtgcatgcacgccgtgtatgcggagaagccgttcgtggtcaagaacccgcagcgcgacatgcgcttcgcccaaatgccgtgcgtagaggacctaggcgtcaagttctacgccggattccctttgcgagcaccgactggagaggtcgtggggtcattgtgtgctgcggacggtgttgcacacaacaatatctcgacgaaggactacgcagcgatggagacgctggccaagctggcgtcagacctgttagctcctaagacgaacaccaacccaccaattatggctaactaaacgagcgatggtacttcacagttaggttttttcataaaaaacttcaaaccatctcgatgtatgattggtcaaagtacctctatgtaccacacttcattagacaaaactctaacatcagtgatttgtatgcaaaaaacctcaaacacgattggctgtttttcttgccttggaatattcaactgtttacgacattatatcacaggaataaactctctttccgctttctcatgtgtatttccaagttctaatctgatcatttttgatggcgcagcgaatttaaacctcacacctgtggaaacggattgtttaaacggcccgataactacctgaaagggcgggaaaatggatttatcaaaatactacgtgatacaccagatccagagcttaaatttaagggcggctacagctctgttagagcagtagaacgcaatatatagtctgattagagaactgttaattctttagcggaccgggaaagtaaattagagatatatgtgtccagtttacattgaaaaattgattgagatttgccgtcacgctacaattttgattgttacaatataggcattgaattgtattctcgtggtttgtataggggtctgtatggaccatttgattggctacccacgcacataccgttaccaagtcaactgtcttgtacaatacaatactaagtaaaatcattgcagccaattttctaattgtaaatgttgaccccaattttatcaataatggtattgcaatttttatttatgcaacgcatgagatacaccgtgtgtctgcattgactggtgatgcatcgacagttttctatgactgtcggttctccggtcgagagcggtgtcaattcctgctctgcatcactcggtagttaatatccatcacgtggcagcattatatagttcgaagttcatcccagcctcttacaactagtagtattaatattgagcaagctactagcccaggttttgcaaaacaggtattattcaggtctggcgacaggtattgtccagggataatttatcccgttttttattaccgtcatttcagcttttgcctcaaagccaccaattcgaggggggcagctccagccacgtggcattcgacgtgcggcggctgctcggccctggagaccccagcatcatggcgcgcacccccaagacggcccatatcaaggcgcggcaggaggaggaggcacgcaggaaggtgaccagcgcgcgcaacagatcgcagcgatcacaggcgcttcaggatgcccgcgactcacgggccacgcagttcggccctcatgcgactgcagaaggcgactcatccactggcgatgaagaggagaaagcggccgaagaggaagaagatgtcgcagaagaagaggaagaagatgatgatgaagaggtagaagacgccgaagatgcagacgaagaggaagacggagatgaagaggttgaagaagatgacgaagatgaagaagaggacgcgcagaagaagaaaaagaagaaaggagctaccaaggacgggcagcgccaaggaaagaagcgcaccgtttccgacgttgaagacgaggacctggtgcacgttctagcgttcaaggcccagcatgactcgtggcccctgcttgatgtcagcctacaggagtacatggatgcgacgcgacagaagatcgtcatcgcggaggtcatcaacgtgactcgccgcaacgcagacttgcgtaagcaggtccgcttccgagggcttcctgacacagaaattcctctcgtacccgacgagtgggagccctatcagcggaagtacatctgcacacacggctggaaggagcgtgagagatcgacggggaagaggacgtcgcgcaagctccgccgaactgagtgtccgttccagatgcttgcacaagtcggccttcgccgagatggaaagttgggcatcgtcatgaagcgagaagtctacagccacaaccaccccgtttccgacgacatctacaggtcttacccaggtatttgccaggttcctgccgagtctccgctcatgcccggaatcgagctcctggtcgacacccaagccagcacttccttcttatctgccactttcatgtcatcaagtggcttcatgaaaccatcaagaaatcgcagacctatggagcctacgaagcagacgttttgacgcagatgaagcacaccatcacgaacatgacatactccagaactgaggaagactatgtgcggcatcgggatgagttcaaaagtctggcctcgcggaatggtcgtgtggagctatgggagtatttcgacaagaactggaatgcgtgccgagcgatgtgagtgatggcttaccgtgtcgatttgccacacttcggcaatcacacgaataatcgtgtcgagagcctattcggtaagctgaagcgaaagctgaaaggccatctaactatgcgcgctagtctggaggtgcttctggaatatcagcgccgcaaagaagaagcctatcggtccaaggtcgggatgccgggtaccctgagagacgcctcgtaccctgaggagttgaacgtcgctctgggcatgaccacaaggtgggtagcagctgctctgaaaacacaatttgatattgctacgaaccccggggttgacactgtgcaggccatgggaagagctttccttccttgtgcacgcgcgcgaccagtcttcccccgaggcgaatcgatacctacgctttcaaggacaatggcgctacgatcaccgtacaaagcgaggagaacgagtatctcctcgagaaggaaggctgggtgtgcgactgcgagttttcgcagactatgaagcttccgtgcagacatgcaatggtctacagaaaagtgtgtggaagccccttcatcatccctttctcttccatttcgcccaggtatgtccagtttttctatgagtcttgaccaggtgttatccaggtatctcgttttacccatgtattgaccaagtttttaccatgttttgttattgatgtgcatgaataggtggtttggacagaatcgcatctcgcaacaggacttgatggaggtggaaaatccgttagttgctaagctctacaaagggcatccagctgcgagcgctggcagtttgagtgaagccgagaagtatcggcgttcgcagtaggcgtttggtcgaactagcagcgagcttgtccgatgcgatgacactgtgttcgagtctgcaatgaagcagattgataagtggtggtacgacttacgtcatgggaagtttccgctggtgcaagctgatgcagacttcgtcgacgattcggggcccgatcaggttggcgctagtggtggcggggccaacagtattagcagtgatagccacggaggcggtggaggtagcccaggaacggggggtacgaatggtcgtcctagtgcttctggtggagaggatgctcacgaaaaaggaccagatgatgacgaagacgaacccccgacacaagtgacagcctctgcccaggaatcggtgcagccaggcaaaggctcaaaggttcgactgacaaacaagaggcgtgtcggtcgaccacggttgaatcgtgctcagatgagagggaaggcagcattggcgctgaaagaatacaacaatggaatgaaactcagagctctactacgagataaggacgtgacggaagtggcagcaacgctggaattgattaagccatgtgtccgcgagctcagctcgtttttgactacgcatgaaacaaagaagaaaggtgacggaaaatcaatccagtggatgtcggacacggaatatatttgcgaggttgtgcgcttccgactaccggagtccgtcgttgaagacgctctagctgaactgagaggtggcttggcaaaaggtccatacacaccgctacatggctttggcttcgacctgacctacgcagaccttttctgcttcagagactccgcttggctgaacgacaacgccttgcgggcgtttaccgtgtttctgtctacttacaagaacaacgtgacggcgatggttcctcctcttaagaagggtaagatggggaagcacatactcgcaccaacgtcgctggacgaggttgctagtggtattgaggcgcatgctcttgtatttatgccggtcgattttggtggagttcattggggatgcatcgtagtgcaccgtgaagcgcggctagtgaagacgtatgacagcatgggtggggagagaaacaagaaacggcttaagaagatggcaaacgagctccttgcaggcccccttgaggatgaagcttacagcgacatcaaagtgacggagccgaagcagacagatggcgatagctgcggggtgtttgcgtgccgtctattgtggacgtgcgttgacagcgaagtgccaagtgatgtgtctcccagtggcgtcaccaagctgcgttgggcaatgctgcacacgatcaccacgatgaagcgtagctagacagtgagcagcagcgagaagtgaatctaatggataatacatggacaactttgtttgcaacctgtaagaaacctgtacgagtagatgggtacacaatgattgttttgaagccattatcatctcgtgtggttccgattgataccaatcgatgccacttcgactttttaccgagtagtgcacacatgagtttaccaggttttcatacctgcaaactacctggacactgaaactagaaatgaatggctagaatgcatccgacacagcctgtaggccgtcattttcacttttcctcaagtactatgcacatgagttttccaggtttttaacctgcattaactgttctggtaatttaatcatccttgtttaaattactttcatctgataacgctcataattcatatacctggatatattgccgtttgcagatattttggccaacgcatgcttattatctcgttaataatctcgattttaatccagccagctcttaattaagtcctaggtctgatttatatatctcgccagtacggtctaagatccaaggcgcttttctacgacttggaaacgcagaaatgccattctagacgggccaaaccgagtttctgggcctaaaagcggcccccagcaaagcataaagctaaatcagccctcgcctatctcgtgtccactcattaagagacaggcgtggtctattttagaggtctattttagagggcaaagtatttgcaagcggcaataacctggggcatcacctggacaatacctgcagaatcagaaatctgagtatttttctaacctgggaaacctgggcgcgtaggctgtccattaatattatttatcttgtaatatccctacggtacatgtagaatatttttgccaccagatctgggcgttcaatcaatatgcaatctatatttccacagtcctgtttcattgttgtggaggtacttgtacacgcatcgtattaagcttagcacgcaatagctagctacatggagcacctctgtgcttggcagatgacttcttcagcaccgaagaaccggcttcttcggcgcaacaagttcggacgccaatgtcgcgagtacctccatcgtggcgtagtccttggtcgaaatgttgtcataaggtacggcgtctgcagcacacagtgatgccaccacttcgccgttgggcccgtgaaccggaaagcccgcgtagaacttgacgccgaggtccttgacgcacggcatctgcgagtagcgcatatcgcgcatggggttcttgaggatcaggggcttctcagcataaactgcatgaatacagacgttgatagtgcgtggtagcgtgaatgcctcctccggcaggttgtacgtgccgatagcgtgggaattgtcgttgtccacgacggacacgaagccgatggggcagttcagacgcttggccgccacttgggccaccagatccagcgctgcatggtcgtattcgggctggaggactcccatctgctcgatgacctcaaggcgtcgaacctccttcttcggcgcgggcatgggaggcatggggtggtccaccgctttggtcttgtccgcgcgaactcgaacatgtagtcgcgctcctcaatatccgcgatgacgcattgatccagattactgaagcggtccttcatcacgcggagactctggctcaggtagttctccacaccctgcgccactagttgaaccttgctgacattcttgcggcgtttgctcttgttgtgagccttagcgcgcttcgcatcaggactcacaaagtcgtactcgtgaatggaggccactgggttccccaattgccccaagaagtccaaagcgtgcgagttctggctcggatcgtccgagtacagctgctccgttagctcctcgacatagctcgagtccgacgtcatggacgccgtgtctccgtctccctccatcgcgtctaaatggtacttgtcgtcgttgtaccagagagcatcgtccactgcaaccacagcaggacccagtgcctccagcaagtcttcatcatcaaacgtacaggagtccacacggtgcacacactgcaagcagcatctattccgacggagctcccccacgcgagcctccacctcgtacagttgcgagcaatcaccgcaggccatgtgcccacacaagtggcagaagaagtcgcgacggaagaagtggaagcgcttggcgcaaatggagcaggccttctccaacgacagatcgtcgtacccggtggggaagtagatgaacgtctggaagccgaagcggcgacgacgcaccacgcgctcgaattgacgcagagacttggtcagcacgttcagcacgtgcttggcctccgggttcatgatagtctctcgacgtcgcgctagctcagcaggggttaccgatgttgcatcactggacttggtgctctctccgaactgcgttgggagcgtaggcgacgcgtacccatgcgcgaagatgcgcgtgacgtgggtgttgctaccggcaaaaccttggctactatgagtgctctggatgtgaaagcccacgctcaagtgatcgacttcgttacgcagcgcagttcggtcggaccttgggatcagttggtcgtgtaactctttgagcagcgtcttcatgatgtggacggcgcggtcctgacccggatactgttgcgtgaaggtggagaagcagagcttctgcgtcttcttgttggtgcctcccaggtccacgggcatccgcggacgcagcgtcgcgacattgacgccgatcaacgcctgctccggagactcctcctcctcttgtttctccatatccaaacgtgacgccaccaccgactggcgtcgcagctccgacgacagcagacgtcgctggctgaagagcacgtcgccctttttgaattcttgccggccagcgccttcatggtggactcgggcgtgatcaacacatttagcacctcattcaaatggcaacgaagctccaccttggcgactacggcgtaggcgatgtcccggtcttcgtccaccgcttgatccccagatgccgtggagagctcgaacaggtcgacgccgtgacgacggtggccctgcctccagcgacgaccgtacgtgtcgcccgcgactgccatgttgagctgggcaccgtcgcgacgatgtcgtcgcagatgtcttggtcggacatgacgagcttgtcgcggccattgggggccgtgaccacgaggccgaccgggggtgcgccatagtactcgctggcgccgtatcgagagcccataacggagactgaaggtgaagccaccacaccgcaacttgcgaagtgagcttgtgagaagaggctagcatgaggatagaaattgacggggcatcgaccgatgtggggtggtgcgtgttgcgccattgacacgtcaggtggtggtggtgcaatttgtactatacctggtcccttggctccaggaaactttcggtgtgaagttcacactcgacttcaccggtaaacgatcaagtgaataccgtagatcacttcctgcgcaggccaagatccacggcttcaacactgaggttgcgtgtcgttggtaaccaacctggttgcaagcgtgcgagctccttcgtcccaccgcgttcaatattcctacttactgggttctggcagcagtaacgagacgaagttcacctcttcgtgacctcatgagcgatatctcggcttgaagagctccaatcgcacccacgtacgcagcctactacagtagcaggtaaagtctggccacatgcgcaagtccctcgcaaatggacgaccgaaggaggcattcgcgaaattatcgtcgcagttccatgcaatcagttccgaccggagctcattgtaccgagtgctgaaaaagggaaattccgaacaggctcgacgaaattgcggggtaccaaccactgcatctgcttgtatggaagtaacatcacattctatcgccaggaatttatagttttggttgctgagagcgttcattcgagggtgcacctagaggaagacccgagggatctccttctcccagttcttctcgaagaaaacctcgtcgttcagacgcacgatcatgcggtctttaaggaagaatgagttcgcgtcggaagccatagagttgtccgtctccaccttgaccttccacggcagcaccgggtgctcagcgaagtcggtgcgttccagcttgaggtcgtcgatttgagtcgctgcagccacttggtcggcgaacttggccagaagctcactgtggacatttgacggcagtttctcgtacgtgagcgtgcgctggatgctgacgcgcgggcggaggcactgcgggtcgatggtgtacgtcttggtggctgtctcctccatcgcgatcccttcgtcgaccagcaagtccttgccttgatcttctttgaccacgagttgctgcatgggctgagacgagtccgtctcggacagaaacagcgtcaggttgcgctccagcggcagcgcctcccgcagtgaaatcgtgcgtgacggcgttcccgcatccagcggatactcctccacaggacacttggctgcattatcactcggagcaggaccctcgggcaaaacagggagcttaagcacattggcctcagcaaaggagaccttgagctccactggctcgggggacggccacaccatgggccagtagttgggcgtgagcgagagcaccagcgtgtggccggcgcgcagtgtgtacgcgcacgcgttgagttgccatgtgactcgagtccccacgccaataggcatgtgctccaactgctcgagcttgtggccgtggcggtggctcagattctccacgccacgcgtgatcagcgtcgacttgcccgaaggagaaacgtcgctcagacgcgccatgatgagcgcctggggcttgtcggacttgacgaacagactgatctcaggccgaccgacgatctcaatgtcttcttctagcgggccagtggaccaggtcgtcgctatcgcgtcctcactcgcttggttacccggcatatcctcaccaccaaacgacagccactcgccgctccacgcgccctgcagactgttcaacgcgatgggacgttcgttggaattgggctgctcagcctcaccccggagcttataacccccttcacttgagcagtagaacgtcacccacttctgttccagcttgtcgacgtcgtccacgccgcaccacttgccagggtactctagaattctggccgttgggttctcgatctcgtccttgatgaacaactgcaggtctgggaacttggccgcggcctcgtccatcttgccgttcaatgagtgctcccaccactgccgacacatttccaggaatccgatctgaggccctggtgtcgcgtggttcggccagttgtgactccacggtccgatgacgcctttgctcggcgaattcttcatgcccttgaccatccgcgccaccccgttgaagtacccgtcgttccagccgccgatctctagcaccggacacgtcaccgtgtcgtacgactcgcagatggatccgtgctcccagaattcgtctcgagtctggtgcgcgagccactcgtgcagccacgggaactgcttgcccagcctctctcgccatcgagccttccactcgtcctcccagcccacggtctctggcgccatgggcaacccgttcaagctaaacatgacggtagcccaactcaacgcctcagagcccaacacggctcctcccatgtagtgcacgtcgtctgcactgcggtcgtcaatggagtagagcgacaccacaccgcgtagagcgggtggagccattgcagccaactgcagcccattgaagcctccccagctcttgccgaagacacccacgcgacccgtgcaccagctctgagccgcgagccactcgatgaccttgaccccgtcctgcagctcctgcagcgtgtactcgccatagtagtggccctcgctgttgccggagcctcggatgtccacgcgcgccactgcaaagccgcgttgcgccagccagacgtggttgcgcgcgtcccgcgtggacgtccagtccgacttccggtacggaatgtactcgagcacgaccgagtacttggtatcagtagtggggggctgcggcagccaaattcgggcggacaagcgcgtggaggcgtccacggggatccacacgttctccagcacgcggacctcgctgataacggttggcgcccccgccatgtttgcttgcttgagaggtattaataccgttgcactgaatgtggtcactgacgttgtgatgtgcaaggagacgcatcaatcaagggcatcaagcacaaagatgttgcaggttgtcattgaaacgagggagatggcattcttttgagataaatttcgctggcgaagataattatgaaaacagccctgttgtgaaaaactttaccggtattactgtaggataagtagtatttggccggacacccgacccctaggctaagcttgccacctcgctgtagccaatcagtgaatttttgttatcatttgaggcttaatgacctattttgcatccaatcgtcgcttatcagggttaggtttattccgttccaacttatttctggaattgttcggaatttcctgcttcgcgcaaataagtaaccatacaaaactaaatatgtttctcgttcttactgataagtgcaatacctgccggatgtagccacattcaggcttgcccatgactgacagcgagcttctcgtggtctcgacaaccgtcgctggaaggttaaggccgactccaacacgcaaaacgctgtagaccgcttctgtggccgagtaaacgaaaggcagaataagcttagtagataactaatgtcctagatgatcatcgaacttccgagttttgcaaaatcctgtagtctctactggatctagctacgcattgttcgtctcgaccgtccacgttgggctgcatcgccgccgcctctacttcacgtcttctcctgcttccgctcggactgcgcggcacagcacagcacccgggtgtgtatggtgccgaggccagcgtctcgtgtagtccagcccactccgcgcgcgcctgctcctcctctgtgacttgtcctcctgccccccctcaccctcctgcacgtacagctccttgaccttgtgctccagctgtgccagcagctcctgctcttggcgggaaggcgccacctcgatggaaagtttccttgaccttactctcgaacttcacttgcttcttcgtcgtgactgttgtaatgcgatgcgggtcgcgtcatcgctccgacctcgctgctcaccgcgctcaccgccttcgccggcaccgtctccttcgtctcgggcggcggacgccgcttggagcgggtgacactgacggccggcctgatagcagcagcggcgccgacggcacccgcggccaggccgttcactttgctgccgtcgagagcgacgtggtttgacgtcacggtcgcgtccctcgtcacccccgtggtcctccgtcggccgcacttcactcaacgcgcagccccgcttgtcgccgtatgtgcctcgagcttctccgtcttctcttcctccttctcacatgcctactccttgctcggcaccaccgccctgtgcgcactactcctgtagcgcctcctgcctcacatcgcgctcgctatgcgctgcttgcgcatcggcatctgccgcgtcgcctccatggcgtacagctcggcctcgacggagaggctcctcgggccgcacggcgtcactcagcgcctcgaagctactgatcatccactcgtcgcgcccgcctcctccttatgctcgcgcggtcacgtccagctcgcccgccggagcgcctcctgccggtactgcgctctgcgcgttcttactcgcgatcacgctgaagctgtggccacctccgatcaccgcttccgtgtcgccgtggtgaggcacaatagcatctacgcccacggcgcaccgtgacctgtcttcttcctcgcgctccagtccactcctagccgcctgccatccgtccctacgtcatacttaaaaaaactgaaccgagatatttacaatagcccgattttcatatctatcgccgtccggaatgaataagtgggcgctgattggcacaagtgattttatgtttcgccagtgtgtctctattgcaggtttgacaggtttccggattccggtccggaatctgacaattactgttagatggagattctccagtcgagaaccaggcagcaaatatgcatggtactcgggagtacctacatgcagtggtctactacatgcatcatagtagtaggcagtaaattagttcgtaaatacatgtattgtgctttgcaaacgtttggtcgttttgactcggagctctcctcgatttatcattaagtcgaggtcgattttataaaacgaggtcaaagaaagggacagatcgatctatttaggacggctaataactcgatctacgacaatccaaatcagggctcgaggtcgatctcctggtggatctgggcagacgagatcgatctacggtaaaccgatcccttttgcgagtacaaaagcgcaattcgaggtcgatcaaagtaaatcaaggtcgtccatgctaccgcctctgttttgtgccctgatttgtggaccggccatcctcgatctaggcctaaaacggggcgaaatattatctgcaaagcacaatataacatacacagtagtttcttgtgagtaatggaagaagacgcaagttttaagacacaaagtcgcgcattgcacgaggaagatctcaaaaaattagtataacagttcatttgttgtttgtaaaaacccgcgttgttcattgccctgcaacgtatctcctgcgcctagttcgcagtcgcggcatctactaattcggttaggaacctgtacatttttttcttattcgtttttttatcgaccacaatcaacttatgtacacgcaaactacttggataactactcctttgcttacttgttgtttgagtttttcgcttcaaagttaaaagaaagtaatacaatagcacaatatcgcctaggcatcttcatactgacagctcaatcctgtcacgtcctagatgttcgtgtcgatcgattcatcgcccaatccgccttaagggtgtcgtacttagccgcctggccattgatcatcatctccaccttctccagcgtttcaaagtccatctgcaccagcttgtgcacgagtagatacttagggccttgtgcgtcaggtcgtggtgacccaccactggtgggggtgattcacatgagataaattctgactggttacccgggccccgttggtcccggggggcagttcgtaagaaaggttaattctggtgtactagttgcgtctaccgtaggtgttgtgtattgtgtgttagtcgcagaaagcgagcatacacatcattacaagacgggggtctagagctcggaagggaaaaacctaagtgcgtaggatatgttgcggcaatgttgtatagatttcgttcagatttccataaaaaggccagttctagacaacttatccccgacatcaactccacaggttttcgattctgacggagggcataccccccccccccacacacacacaatgctgactttatcggagtcactggccgcacactttggattagaacgtttgtgtgagcacggcttcctcgcagtaagcttatcaggtgacgctagtggactcgacgttataaccaacaaccatgtgggacaactagattcctttattttccaattgaaaaaaatcacaagcgacttgggcgcgccccacttgcggcgcgccactcgcaataacaaaatatcttctctgagcttacgcttgattggcttgagtgggtcggtcgtgatgatttcttgttcgtcttccccttcgtcttgaattgattccaaatcgtccaaatgaggatggtcgaacgtgttgagctgcttctccttcctttgacgcagggttgagtggaggccgctgtcagctctggaataagacgcctgccgtttcaacggtatcgctgctttcttggactgtgtagatattgaggacagtgattttgcaggtgacggtgcttcgccatcaccaggctgcttacgagacttcataccgtaggacacggattcatcatcgctgctgtagatgagatcatccccgtcagccgcctccgctactcgacgcataattcttcgtgtcagcgctctttggcgtcctcttcatcgctcttgctgtcatcgtttgggttccacattgctgtacggtaagggttatccgtcactgtaatggagtgcaggaacgttggctattgcgagaaccggaacgtgctgtggatctggatttccccgactttaatgacttgagctggatcgaggttcgcagcgagtagatatcttgcagtcgggcgcctttacgcacgtgctggtagactcttccagcgtgactttgtcttttagcacgtccaacgtgtcgcattctgcagtaccaaaaatcaaagtgaagaccaagtttcgccacactaaagggttaattatgcacctgaagactcaagcgcaggctgcttcgccttcttgcccttatacaagcatccagttcatgtccgttctcctgttcagtaaattctaaaatggcattaagcgagccggccccgctcggatcgtgaacatacctcaatctaaagggcttctgacctataccttttctctttgtcgtcaggggactcccccagtgattgaaaaaaatgcattggcaagcattgcaaatgtaccgtaccattgcaatatcgacgccaatgttacctctcggtaaaatcgtgtcatgcagtattgcctgagctcccaatagagtattgcaatgctccagcactatccaataccgtattttcataccagctggttaccggctaaccattgctactaacgtttgctaccaggtagcgctaccaaccatcgctgccaaccatcactgccaaccatagctaagcccaaagtctttatttccgttgcttccatcctcactttcaggttaactctccgactagaaaccacttccgccacaactgcacgtttggcacgcactcgagttccagacgtagctcgatactacttaaagatcaaccccgccggtggcaatcgtgcctacacatgcgacaagtgcaagaccacacctatgaacaagctggtcacgggttacactaatctgcgaagacatttgacgtcgtccatcggtgtcgactccaacgagaagacacggctgcacacaagagccaaaccaacactctgtggtttcaagtgatcaactacgtgcgtgaacgtgagtacgtagtattcaaatgggtcacgtggctggtcatgcgcgacatgcccttctcagaaatcgacaatgatctcacacgcgagttggcgggcatgccgaagtctgcgcacgtgtcaagccgctctatcaagacgtacgtctaccccttattgaagctaccatcgcggctgagctgccgcacaagtttgccgttatgtttgacggctggaagcatcgcacgacgcactatgttgccgtcttcgcggtgtacgtcaaggacaacgagagcaaaggggtgcttttgggaatttcgcctccactggattgttgtgattacacttcgctgtctactcgacggggcccctgctacgagtctcatggcctgcgcgtgggtggcgcgtgcctctagggggcggtagttgaagtggagcgactgattggcggatcatctggggtcgcgtggatatgattggacgagacggttgaagtcggatcaacagctgtgattagcatgggataatcacatgcattgacgagacagccgtgtccgtcccactggatttgagtatggaccgtgcccgtcccaatcaagtgtgtccgtcccgggacactgtgattggccgacggcccgtgcccgtcccactcgagtgtgaccgctgcacatgcatatagttaaatgaagtcaaacgagggagacactaggagagctacaggagtaggaaggaacaagcagaacaaagacaactaactcaaataaactcactttctgatttccttccttctgctcacatcgactacaagcctcattcgccactctcaattggttatgagcccaagctacgcggacaccgtcaagctcgtggaagacaactacttccactgggagttcaacatgcgggtgaagctttctcgcaagggactgctgccccacatcatcagggcggagttcgacccggtgagcaaccgcaccacggtcgtatggaaaaccgacgatctgaaggcccttggcgtgatcgctggtgacgtcagcctcacgttccaagtctacatccgtggtgcaatgactgccatggacgcatggaccatgctccaggagcagttcaaccggaacacgatcaagaaccgactcctcgtcaccaagaagctgcacaacatcaagatggggcctggtacgcggctcgcaacgcatgtggaccgattcaaggagctcgtgctccagatggagacgattggtgagcctctggacgagactcgttagttcgtgctcctgctcggtagtttgacggacgagtaccggatgatcagcaccgtgctcgagaacacgccgaacatgacgatctcgtacgcgatccaagcgctctctgatgttgaaacctcaagtggctcgtggactccggtgccagctcgcacatgaccagcgtccgggacaagtttgtgtccatgaaggagctgaagacgacggtccgcatcaccatcgcggacggtacgaagatcgacgcggttgcaaagggcaccgtcgggttgaagctgatgggcggaacgtcggttacgctgtcggatgtgttatacatccctgaagttgatggaagcctcatctcggttgctaagctggtcgagaaagacgtcatcgcgcagttcagcgaggacaagtgtggctttcgctatggcgacgctaccgtcatggaggccaagcgctgtcgaaacgtctacaagttgaatacagtgggggacggcatctcgtaaggagccatgggctgttgtgcacgcccgtctcggccacatcccattcaagcgctatgaacagctgctgaccatggcagaaggggtgtctcgcgttacgaatggtgtcactagtaacaacggctgcgcaggctgctgcatgggcaagataagagccgacgactatccccgacacccggagcagctcgtcaagagtgcaggcgtactggatttggtgcacacggacgtgatgggtccgattcagaccaagactcccggtgactgaacgtacgcggtggccttcattgacgactactcacgcaacgtgacggtctacttcatgaaggccaaatcggaggtgctgtcccggttcaagatcttcaaggcagcaatggagagcggaacgggtaagacgatcaagcgcctgcgttcggacaatggcggcgagtacacaggaaaggcgttcaaagcctacctcggccgcaacggcatcaagcatgagaagacggtgccgtacacgcctcggcagaatggattggttgggcgcatgaacagtttggtggagatggcgcgctgcatgctctacgatgaaggaatcgacaagaagtggtgggcagaatctgtcaacacggcggcgtggattatcaaccggatccccaactcagtgaatgtgaagacgccacatgaaatcgtttacgggacacgcagctgaagaacatgaaggtgttcggtgcacttggctacgcgcgcattcccgacgagaagcgccgcaagctggatgctaaggccttcaagtgtcgtttcgtgggctacgaggacggtgtcaagggataccgagttctcaacgcggcgataggcaaggtgcacatcgtgcgcactgtcaagttcatggagacgacgagtctgcaacacgtggtgcccaagtcgacgacgaggtcacagctatggagcctagtcacggtggattgcaaccggaggagtcgaagcaactcgtgccaacagttgctgaagctggtgacgtgatcccacttcaacgcgacgcgggtgtaaacgatgcgattgtggcatacggttcgaccgatcctatgattacccggtcgcgagctcgccacattgacgagacaacggatcctgaagtggcaggagcccgcaagacgcaggtggtggcgccgtcgacaaccagcacgaagccacagaagatgacccgaggcagagcccaggtgcgcgaagcccagctcgccattgaaggtggccaagcgatggctgcaacggaggaagtcccacggacgtacgaagaagctatagcaagtgcggaccgagtggaatggaagcgagcgattcaaagcgagttgaagtctcttgtcgccaacaagacttggaagctggtaccgagaccagcccaccagtggccgatcggctgccgttgggtattcgcgttgaagcgcaacgagaaagggcaagtcattcggcacaaggcccgtctcgtagccaagaggtattcgcaacgacacggcgtggacttcgaagagacgtacgtgccggtggcttacctgaactcaatccgtgccaagttggcgaagtgcgccgcggatggattcgagattgagcagtgtgacgtcgacactgcgttcctgtacggcaaactggaggaggagacctacatggagctgcctcaaggactccgagacctgttgacactggctgaaacggaaggtgaggacaacgtcgtatgcatgctgctgcagaatttgtatggactcaagcagcgtaaccagacgatcgacactcacctgaagcggatggggttcaagtccgccgacgctaacccgtgcatctatacacgcggtcaaggtgacgacgagtgcattgtgtgcctctatgtggacgacatgctgtttgcctcgccgcagaaagatgtcagtgcgtcagtgaaggctgggatcgcggagaagttccggatcaaggacctcggccgcgcccgtttcattcgcgggatcgagatcgactacgacattgagggaagaacgctacgcatcagtcaacatacgtacgccgagtcgatcatcatgaagattggacaggagaacgcgaagacgtgctcgtctccggtggaaccaggtgtgcatctgaccaaggccaacgaaccgcaggccgaagacgacaagtccaagatgaagtcgaagccctatcagtaattcgtgggcagcctaatgtacctggcgtgtgggactcgtcctgacatcgcggtggccgtcgccaagctgagccgtttccgggagaaccctggccagaagcactgggacgcagggattctggtcgttccttacctggtgatgaccaaggacgtgggcattacctacgatggactactagggacggaactcgtcgcctactcggatgcggactgggccggcaaccgtgacaaccgtcgctccatgagcggtataatgctcatgatgtgtggtgctcctgtggtttggcgctcaacgttccagaagactgtcgcgctcagctcaacggaggccgagtacatggcgctgagcgaatgcgtgaaggagtgcgtctggatgcgccgattgctgaaggacattggtgctgaacaagtgggggctaccgtgatctacgaggacaaccaaggtgcgatggccctggaaaagaatgtcggttaacaagctcgcaccaagcacatcgacattcgctaccacttccttcgtgagaaggtggtgagcaacgaagtcgagctggagtacatcgacaccaagaaccagctcgccgactccatgacgaagggtctgacgtcgaagacgctatgccacttgatgatgcggagcaacgttggccccaagctcgagacatcaaattgagtgggggtgttgtgattacacttcgctgtctactcgacggggcccctgctacgagtctcatggcctgcgcgtgggtggcgcgtgcctctagggggcggtagttgaagtgaagcgactgattggcggatcatctggggtcgcgtggatatgattggacgagacggttgaagtcggatcaacagctgtgattagcatgggataatcacatgcattgacgagacagccgtgtccgtcccactggatttgagtatggaccgtgcccgtcccaatcaagtgtgtccgtcccgggacactgtgattggccgacggcccgtgcccgtcccactcgagtgtgaccgctgcacatgcatatagttaaatgaagtcaaacgagggagacactaggagagctacaggagtaggaaggaacaagcagaacaaagacaactaactcaaataaactcactttctgatttccttccttctgctcacatcgactacaagcctcattcgccactctcaattggttatgagcccaagctacgcggacaccgtcaagctcgtggaagacaactacttccactgggagttcaacatgcgggtgaagctttctcgcaagggactgctgccccacatcatcagggcggagttcgacccggtgagcaaccgcaccacggtcgtatggaaaaccgacgatctgaaggcccttggcgtgatcgctggtgacgtcagcctcacgttccaagtctacatccgtggtgcaatgactgccatggacgcatggaccatgctccaggagcagttcaaccggaacacgatcaagaaccgactcctcgtcaccaagaagctgcacaacatcaagatggggcctggtacgcggctcgcaacgcatgtggaccgattcaaggagctcgtgctccagatggagacgattggtgagcctctggacgagactcgttagttcgtgctcctgctcggtagtttgacggacgagtaccggatgatcagcaccgtgctcgagaacacgccgaacatgacgatctcgtacgcgatccaagcgctctctgatgttgaaacctcaagtggctcgtggactccggtgccagctcgcacatgaccagcgtccgggacaagtttgtgtccatgaaggagctgaagacgacggtccgcatcaccatcgcggacggtacgaagatcgacgcggttgcaaagggcaccgtcgggttgaagctgatgggcggaacgtcggttacgctgtcggatgtgttatacatccctgaagttgatggaagcctcatctcggttgctaagctggtcgagaaagacgtcatcgcgcagttcagcgaggacaagtgtggctttcgctatggcgacgctaccgtcatggaggccaagcgctgtcgaaacgtctacaagttgaatacagtgggggacggcatctcgtaaggagccatgggctgttgtgcacgcccgtctcggccacatcccattcaagcgctatgaacagctgctgaccatggcagaaggggtgtctcgcgttacgaatggtgtcactagtaacaacggctgcgcaggctgctgcatgggcaagataagagccgacgactatccccgacacccggagcagctcgtcaagagtgcaggcgtactggatttggtgcacacggacgtgatgggtccgattcagaccaagactcccggtgactgaacgtacgcggtggccttcattgacgactactcacgcaacgtgacggtctacttcatgaaggccaaatcggaggtgctgtcccggttcaagatcttcaaggcagcaatggagagcggaacgggtaagacgatcaagcgcctgcgttcggacaatggcggcgagtacacaggaaaggcgttcaaagcctacctcggccgcaacggcatcaagcatgagaagacggtgccgtacacgcctcggcagaatggattggttgggcgcatgaacagtttggtggagatggcgcgctgcatgctctacgatgaaggaatcgacaagaagtggtgggcagaatctgtcaacacggcggcgtggattatcaaccggatccccaactcagtgaatgtgaagacgccacatgaaatcgtttacgggacacgcagctgaagaacatgaaggtgttcggtgcacttggctacgcgcgcattcccgacgagaagcgccgcaagctggatgctaaggccttcaagtgtcgtttcgtgggctacgaggacggtgtcaagggataccgagttctcaacgcggcgataggcaaggtgcacatcgtgcgcactgtcaagttcatggagacgacgagtctgcaacacgtggtgcccaagtcgacgacgaggtcacagctatggagcctagtcacggtggattgcaaccggaggagtcgaagcaactcgtgccaacagttgctgaagctggtgacgtgatcccacttcaacgcgacgcgggtgtaaacgatgcgattgtggcatacggttcgaccgatcctatgattacccggtcgcgagctcgccacattgacgagacaacggatcctgaagtggcaggagcccgcaagacgcaggtggtggcgccgtcgacaaccagcacgaagccacagaagatgacccgaggcagagcccaggtgcgcgaagcccagctcgccattgaaggtggccaagcgatggctgcaacggaggaagtcccacggacgtacgaagaagctatagcaagtgcggaccgagtggaatggaagcgagcgattcaaagcgagttgaagtctcttgtcgccaacaagacttggaagctggtaccgagaccagcccaccagtggccgatcggctgccgttgggtattcgcgttgaagcgcaacgagaaagggcaagtcattcggcacaaggcccgtctcgtagccaagaggtattcgcaacgacacggcgtggacttcgaagagacgtacgtgccggtggcttacctgaactcaatccgtgccaagttggcgaagtgcgccgcggatggattcgagattgagcagtgtgacgtcgacactgcgttcctgtacggcaaactggaggaggagacctacatggagctgcctcaaggactccgagacctgttgacactggctgaaacggaaggtgaggacaacgtcgtatgcatgctgctgcagaatttgtatggactcaagcagcgtaaccagacgatcgacactcacctgaagcggatggggttcaagtccgccgacgctaacccgtgcatctatacacgcggtcaaggtgacgacgagtgcattgtgtgcctctatgtggacgacatgctgtttgcctcgccgcagaaagatgtcagtgcgtcagtgaaggctgggatcgcggagaagttccggatcaaggacctcggccgcgcccgtttcattcgcgggatcgagatcgactacgacattgagggaagaacgctacgcatcagtcaacatacgtacgccgagtcgatcatcatgaagattggacaggagaacgcgaagacgtgctcgtctccggtggaaccaggtgtgcatctgaccaaggccaacgaaccgcaggccgaagacgacaagtccaagatgaagtcgaagccctatcagtaattcgtgggcagcctaatgtacctggcgtgtgggactcgtcctgacatcgcggtggccgtcgccaagctgagccgtttccgggagaaccctggccagaagcactgggacgcagggattctggtcgttccttacctggtgatgaccaaggacgtgggcattacctacgatggactactagggacggaactcgtcgcctactcggatgcggactgggccggcaaccgtgacaaccgtcgctccatgagcggtataatgctcatgatgtgtggtgctcctgtggtttggcgctcaacgttccagaagactgtcgcgctcagctcaacggaggccgagtacatggcgctgagcgaatgcgtgaaggagtgcgtctggatgcgccgattgctgaaggacattggtgctgaacaagtgggggctaccgtgatctacgaggacaaccaaggtgcgatggccctggaaaagaacgtcggttaacaagctcgcaccaagcacatcgacattcgctaccacttccttcgtgagaaggtggtgagcaacgaagtcgagctggagtacatcgacaccaagaaccagctcgccgactccatgacgaagggtctgacgtcgaagacgctatgccacttgatgatgcggagcaacgttggccccaagctcgagacatcaaattgagtgggggtgttgtgattacacttcgctgtctactcgacggggcccctgctacgagtctcatggcctgcgcgtgggtggcgcgtgcctctagggggcggtagttgaagtgaagcgactgattggcggatcatctggggtcgcgtggatatgattggacgagacggttgaagtcggatcaacagctgtgattagcatgggataatcacatgcattgacgagacagccgtgtccgtcccactggatttgagtatggaccgtgcccgtcccaatcaagtgtgtccgtcccgggacactgtgattggccgacggcccgtgcccgtcccactcgagtgtgaccgctgcacatgcatatagttaaatgaagtcaaacgagggagacactaggagagctacaggagtaggaaggaacaagcagaacaaagacaactaactcaaataaactcactttctgatttccttccttctgctcacatcgactacaagccccattcgccactctcaatttggacgagaagatctatacagcgaaggctcaccgagatttgctcgtctcgatctgcggggtgtacggtcggtcgctggccgaccttgtcgtgttgattggagataacagaaccacgaacaaggcaaccgccactttgctatgtgtgcccctacttgggtgtgcctgccacaatctgaaccttgcgattacgcaattcatcaaagactagccgaaggcgaacgccgccatcgacagtgtgacctcgttagcgtctaaggcgaaccatttaaaagcagcagctgcgctgcgcgagctgaccgacctcatcgcgagacgaaacaacgatacccgatggtcgtcgacgtaccacatgctcaagcgcttctttaagattgagcccgagctgaggcaagtacatgaagtggaaatgcttcgtcggacgcagctacaggtgctacgagagttgatgcccacgttgaccaagttcgactccgtcatggttgggttgcagacaacagacgtcacgctaaccgcagcccgaaccacgaccgacgagatgctggaggagtttttcgaactcgcgcgctacatggcgcaggatgcgcacatcgtccaaaacccggtgttcgagtccgctgttatgaaggtacagatggacagaattggcgagctctcggaagctgaacgagcggcggtgaaagtatttgaagttccggaccaagccccaataaggcaggcagttcaactggaggattgtgactactacaaggagctacaggagcgcataaagctgaaacggcaacgagtcacggcgtacgcaaacttgtgttttctgctcggtacatcagccttggtagagaggctatttagctctgccaagtgcgtgatgacggaaagttggaacaggctgcgtgcggtcttgttcgaggtgagcatgttcctgaaaacaaataggtcattctgggacagtcgacttgttgcggaagctgtaaagcgtttccacagtagtgatagctagaacacaccatcggctactatcaaacaggcaattttccctgcgttccaatcgagtattgctatattgcttgggtttgcagttgagtattggtattggctttgccatgccaatagtgtcctgccgtttaattttttaatccgcaataaaagccacgatattttgggaagtcactcccctaagttatgtgtccaacactagtgaatccccatacaaatgctgagataaatcgacccaatacaaaagtacgtcattcgaatgcatacaaaaacccatttcaacacaaaagtcaagtaaaaggttatggcgataccggtatctgacatcaaacaggtagaaacgacagttatttttagggatcacaagctatgaattagcctaacgaatcggcaacagtatcagcttttcattggtattttacttgtgtgtagatcaatagtaatggtaacctcaacggtaaaccgtataataacccagggtacgaacgtcgcacaccgccccaagatgtgttgtcaagactgatgtgacgacgcctcgccaagcgaccgtgtgacgcgaacgcgtcatcagtgaggttggcgtgaccttcactgtgttgtaccgcaatcattcaggtgattacgggacgatgattacgtcacggtgattacgccatgattgtgggtacaggattgtgggtacaagatgggcatcgacgtggcgttctctgattggataaggtaactgtgtatccagtagagaatccagtagggtgtatccagtaagaggtatccagtagcaggcttagaggtagcacgcggttgcgaactaaggacctgaatcgaatcactttgcattttgccaactactgctcaagtgctcttccttttggttatgagcccaagccccgtcttccctgaccaagaccccgactacgccttcgccatggacgccgccccgaccgcgaccgcccgcatcaacaagttcgacggaaccaacttccacacatggaagttcaagatgcagatggtgctggaggagcgcgaattgtgggaagtgacgagtggggaagtgaagctcgagcagtgcacgaccgcggcggaccaagcgacgtttcgcaagaagtcgcgcaaggcgctggcgatcgtctgtctcgcgatggaggactcgcagctgccgctggtgcggtcggcgaaggacgcgcatgatgcatggtcaagactcgagggacacttcgagaagaagagcctggcgaacaagctctttcttcgtcgacggttcttcacgacaacgatggacgaaggtgatgatgtgctggagcacattaacaagctcaagacgctggcggaacagctcgacgcggtcggcgctccggtcagcgaggacgacttggtgatcacgcttcttgccagtctgagcgagtcgtaccagttcctcatcacggcgttggaatcgcgttccgacacgctgacgtgggagctcgtgacgtctcggctcctgcacgaggacatgaagcgcaaggaacaaggtggcggtgctgacggaaccgcgcacgctcaaggtcaagcgttcatgacaagcgacaacgggaagcgcaagggacggcaggcgcaagcgcagaggacgagcgcctgtcactactgcggcgagcacggacattggatcgccaagtgtccggtgcggatccgcgagaacggggagcggcagaggccgcaacgagcgaacgtcgcgcaggtcgaagatgactctggcgacttcctcttctcggttggtggcgacacgggtgcctccaagctgagcggcatgtggctggtcgactcaggtgcgacgcagcacatgacgtactcgaaggagtacatgaagaactacaagaagatctctccggtggacgtgcatctggcggacgacggcgtggttcaggcggtggggagcggcgacatcgtgatgtcgatgcagacaccgcgcggcatgaagaagggtgtgctcacgggtgtgtggcacatcccgaagctgtcgcgcaacctgttctccgtcggccgcttcaccaaggacgtcgggccagtgaccttcgagagcgacgggtgcttcgcggaaacgaagggtctcaagtggaagctcggcgctcgcgaaggcaaaggactgttcaagctctgcatgacgccgatgacgcctgctgacgaggccaatgcggcaagctcgaagaatcgccaaggggacaccacgtcgtacctctggcaccttcgacttggtcacatcggccatggtggtctcgacgccatcgtcaagaagggctacggcactggcatcccaatgacgtcggtgaagcagtgggaggtgtgcgacgggtgcgcactcggcaagcaaacgcgagtaagcttcatgaagtcgtcgccgaaccgtgcgaagcaagtgctggaggtggtccacagcgatgtgtgcggtccgatgcagacggcgacgttcggaggcaagcgctacttcgtcacgttcatcgacgacaagtcgcacttctgcgtggtgtacctgctacggaacaagtcggaggtggctgccaagttcgctgcgttcgtcgcgttggctgagacgcagaccggcaagcgagtgaagatgcttcggagcgacaacggcggcgagtacacttcaggtgcgatggccaagttgtgtgcggatcgcggcatcgagcagaagttcacgccgccatacacgcctcagctcaacggagtggccgagcgaatgaatcggacgctggtggagtgtgcgcgctgcatgctggagcacgccgggttgtcgaaggagtactggggagaagcggtgatgacggccacgttcctccgcaaccggtgtccgacgcgcgccatcagtcacgacaagtcgccgcaccacgtttggaccggcaagaagcctttgctggccaacctcaaggtgttcgggtgccacgcgtacgtgcacgtgccgaaggagaagcggtcgaagtttgacgctcggtcggtgcgctgtcgtttcctcgggtactcggagcacgagaaggcgtatcggttcgaggagatcgagagcggtcgcgtgttggtgagccgcgacgcgcagttcatggaggatgtcttcgacggtgggagacgcgactacgcttcgaaggaggtgttggtgggtcttccgacagatgatgatgaagacaccacggatgaagagactcagtccggatcagacgagaacagagaagaagctgcgcggaatcaagactttgaacccggcagcaagcgacacccgcgcacgcagtcgctcgaggaagtcgtggaggttccgagtgccaagcggtatgcggtgccgagacgacagcagccgctggacgagatgtctgccgcagcacaagagaaggaagacttcgaggctgcgtacgtcgtggattcagtgggagagatgccgacaacattcaagtcggcgatggaatccagcgacgcagacaagtggaaagaggcgtgcgactcggaggtggagtcgctccgcaagaacgagacgtggatcctggtgccactgccgaagggacgcaaggcgatcggctgcagatgggtgttccgcgtgaaggagaaccagtctggagagatcgagcggttcaaggcgcgattggtggcgaaggggttctcgcagaagtacggcatcgactacgacgagacgttcgcgccggtggccaagttcacgtcgattcgggtgttgctgagtctggcggccaagtacaagctcacagtgcaccagatggatgtgaagaccgcgttcctcaacggcttgttggacgaggacatctacatggcgcagccggacggatatgtggacggagatcgacccgactacgtgtgccggctcaagcgttcgctgtacggcctgaagcagtgccgcggatgtggaacaagacgatcgacgagttcatgttgaagctggggttcaagaagtgcgagtccgaccactgcatctacttgaagcgggacaatcacgacatgatgttcgtggcactgtacgtggacgatctggtactcgccagcagcagcgacgggatgctgaaggacacgaagcaggcgctgagtgaccggttcgagatgactgacatgggccagctcaagtacttcctcggtatggagatcgagcaagatgtggcgactgggaaggtgtcggtgcggcagaccaagttcgcgaaggacattctcgagaagttcaagatggatgagagcaaccctgtgaagacaccgcaggatccgggtctgaagctgaccaaggccatgtgcgagggaggctgcaagcacgacgagaccatggcgaatgttccgtaccggaacgccgtgggctgcctcatgtatctcatggtggggactcgtccggacctcgcagcggcagtgggagtactgagccagttcgcagcggacccatgtccgacacactggcaggcgctcaagagggtcttccgctacatccgaggcacgaagacgcacggcctcgtgtttcaagcgagcagcgaggacggactgcaaggctactcggacgcggactgggccggcgacatcgagtctcgacggagtacgagcggctacgcgttcatgatgaacggcggatgcatcagctggcgaagcaagaagcagcgcacggtggcgctctcgtcgacggaagccgagtacatggcgctgtcggaggccacgcaggaggcggtgtggctcaaggtgtttctgtgcgagctgggcgagatggcgagcgatgaagcggtgaagatctacgaggacaaccaaggctccatcgcgttggccaagaacccggagttccacaagcgcaccaagcacatcgacattcgctaccacttcgtgcgcgagaaggtggaagacggtcaagtggtgttgcagtatgtttcgacactcgacatgctggcggacatcatgacgaagccgatcgcggcgccgcagttcgacgcgctcaggacgaagctgggcatcgtggtcgctgacgagtcgagtgggagtgttgtcaagactgatgtgacgacgcctcgccaagcgaccgtgtgacgcgaacgcgtcatcagtgaggttggcgtgaccttcactgtgttgtaccgcaatcattcaggtgattacgggacgatgattacgtcacggtgattacgccatgattgtgggtacaggattgtgggtacaagatgggcatcgacgtggcgttctctgattggataaggtaactgtgtatccagtagagaatccagtagggtgtatccagtaagaggtatccagtagcaggcttagaggtagcacgcggttgcgaactaaggacctgaatcgaatcactttgcattttgccaactactgctccagtgctcttccttttagatgaattcttttgtctgaaaattgaccccaggaggggaacagcaccacgcatactacagtaattctcgatgtttgaaggctatgtattagctgatccatagctacagtgtgaccaaagaaccgacgtggtaccgccttctagctcattgcatgccgaatgttggatctcacccgcttcaatcgctcattctctctcttccgcttattcccagccttgtacattttgtttgtagccgtaccaggaattcgcttcgtaatggacgtcttcaaatacttcaacacatccataaagctccgctcttcatcaatcctgccttccgcggacaccggtcgcaacgctcgaccatcactctcttgtgttccatcgatagggtaggcggtgtccacatcggagatcacagcgcgattcgagttggtggtcgtgaatgcgctgccatcggagtagagcgtagcagcaatggtggcagcaaggatgtagacaagacgcattcttggtcagtggtggggcgactgaggttggacggtgaagtggggtctctgtggttttccgagcaaaatgcagaatggagtttcggatttttagtttaaggtaaggtgccagttgcgtgcctacaaccagttccatgcctacttgttttagccaattagcattttctccttgttaaactctcgtagtctattggtagatttttccagcgtcacatgcagttccggtgatgagcctcctaggatttgcataacatacaaaaatgcgatcaaaaagaggcaggaaactggcagctcactccaaatcaacaagcttttcaaaacaataacaagaagttctgcaaattttacacggaccagcgtgaagtacataaattcagcccaatcgcgaagatttagcgggtgcaatcagatttcagaatggacaattcaatgaaaagttatgccacagcaagcccgcaagttcgaaggacggcacgaaactggcagaagaccttacacggagctttcacaagtagactacagcgtcggacagaatgtaactgccagcactgagcgatggtgaagagcatgtcgctgtacaattgcattgcgaacgctgcggtatgtctcaaacatgcgaattaatacccgcagttgtattaaaatgcatctggctttaatatacagtttgccagtatgcaaattccatcctggaacagacaacgtgatcccatgcgctgcattacacccgtctcccgatttcctcgcgatccattccgtgatctgcgattatggtgccgtcaaacgcaatgctgggacagccttccacttgtgcgtggcccaccagcatctctcgctgccaccacggcagtgccacaactaatacgtcatttagaaactcgccttctcgggagcaaacttgacttcaagacaatggtgtgctccttcatgttcaagaccgcggccttggtttcggctgtgctggcgactttcagcggtgccgatgcggagctggaaaccgtgaagctcaaccacccgaccgggtccagcgccgaggtcttcctcttcggtgcccacgtcaagtcgttccgcagcgtgttcgacccgaacatggacattctgttcatgtcgaaccgctcgcacctcgatggcgtgaaccccattcgtggtggcatccccgtcgtgttcccgaacttcggcagcgccacgggtttgcccagccacggcttcgcgcgcatcaccaactggacgctggccagcgttgtgcaggccaccgatgagaccaagcccagcgtggccaagttcaagatggcggccagcgaggcgacccgcaagatgtggcccgttgacttcgagctccagtacgaggtgaagctgtggtccgcccagctcgaaactaccctgaacgtgcacaacacgttcactaaggacatcgacttccacgcgctgctgcacaactacatcgccgtgaacgacgtacgcgacaatggtgtggtggtcaatgacctcaacggcgtggactactacgataaggtcgccaaggctaacaagacggagactcgcgacatgatcagcatcacggcacagaccgacaacgtatacaggaacgccccagtcaagatccgcgctcctatcaggggtgtcaactttgactacaccgtgcaggtcgagaagaagggctccatcaatggcgccgcaaccaagaccgacgttgtcgtatggaacccgtgggccgaccgcgctaagaccatggaagacttcggccccgaggagtacctcaagatggtcgccatcgagcctggtcgtgtcagcgagaagcaggtgctgcccgctggccagacgtacacgctgcagcagactgtctcggccatccgatactcgtaaagaatgcaaagtcgtcaccggtggttacaatacctagctggaaatgaacacgaacgaatgcatacctaagtgaagttcttccgcgtgttatcaattgtattacagaagtattgtaaatggctgaacgcggcacatacacatgcacgtccacgtagtatatgacaaatagcggcggctgttgcagcaactgggttgaagcgttcatgtccgactcgactcgaattctcgagagctctttgcagcgaaaggatgctttcgaaccgaagtactgcgaggtaaaattcgcatttttttttactactgtagtattttcccaagctttttggttttaagaacatgtgaagagtaattcaattgtgcacgtatcattagaaagataacttgttataagggtgcgtactgcacaactaaattccagcggaatggggccaattccagcggaatttgcattacagcggaatggccgatccgctggcgcgtactgcatgcaattctagcggaaattcgagcatattccagcggatttcatccgcccgaattcgggcaggcagcggattgatccagcggaattgaacagatggcgcctttgcaaagactttttcttagagagtgggtggactccattcacaagcgcgtctctgtgactgcccgcgggatactgcttgcggaggcgatggcaatgccgaaggcagcgaagaggggtgacgtggcacggtggcggagttatcgaatggaagctgtcgccgctgtggtaggaaggaaacatgtcattcaggtcgatactctcaaagggagtttgggccaagtccgacagtaccgtattttagatatcatactacagagagatctcacaattcagagcggagagatttgcgacataataatattatctttcttgccaaaactggccatattatggccagttttggcaagaaagatccaaaaatacgcacaaaagggtgaaatggtgcaaagacaaaatacaacaacacaatttcaagaatatggtgtatgaagtatgagatctcaaatacggccccctccacaactcaatacacgttgcttctgatgcacgctctgtttacgatatttgaccgtgtaaaatagcgatccgttggacagcaaaatcgcgcaaaacgaaacagtggattgctcattccagcgggtgagtcggttccagtggatagagctatccgacgttttattccagcggaactgcagtacgctttttttcactttaacgagtcgtagtaccgtacactttcggaaagcttgtttttttcccgcagaaatggataatgtgtttccacttctgcgttgtcgatcccatcagtttagtacagactccgtaaaacttccgtacactacaaatgttcctcaaaagcgaggaatcctcgcttttgcatgtcgagcgacctctgttttggtcgacgcggtgtgatgacgtccgcgggatctggctccgtacatgtattcgctgcatccctgacttgctgttgactgataagcgcggtaaaacgtccgcttcaaatcgggcatcgagcatcgagaaaggttggcaacaaggcgccctcgtccagcgtccaaatgcctcctctgcgaaggtgtggttgttgtcactgcggagcaccgccgtgtacacgtaccgtagacgaacttgcctccaaattgtcggcgtcaccttcaaggcggccttggtctgtttgtcggtcggtcggtcagtcggccagccggactccttccccgtaccacagccacagacaggccgaagagactgtagccaaactgaagcgggcctcaggcggtgcactgcattcatcctcccagcgaggcgcttgtgtgtgctaagagttcctagcactcagagtgtctgcctcccatcggcccgcatattaacctgccacgtattcccacagcatcagcaaaatggcaatacagtgaaccctgtacagcatttgaaaccaataattttgggaaaacgtcaaaaggtgtatgcgttgggaaaacgtttgtcaataggtgtagtggtcgtgggcgtcacgtcgcgtcatgtctcatcatacacgtactgacacacgttttggttgccgcggtatttcggccgaggtcgggtcatacagacccaggatcgagcttctaagcacagtagtttcttaacgacacgctcgttgcgaacacggtcaactaataatagcatatagagcaactgtactcgacaacttcgctattgtggctacaaggaactaccaacgcaaaccgcaagcgtctatagcatggctgtactaggtaggttttgcatctgaatttcggaggtgaaggaactctagtgagagccaaccggaagagagtgtaggtattgtagaactgtggcaacgctgaggcctggctacaatggataacgacgttcattgtagtccctcagccgtacaattcgctatcaaagtcatggacaccacgaccgggctagttgcatcaggtagaagccttcctaaccccgggttttatggatttggatctaagcccacacaccagtcaccgcattcgttgctgatgcagctttatcatgcaccttagtgcgcttggaaccacatacacatactgtcataccgacaacctagcatacacctaatgacacgagttaaccgcttttgacaaaacgtttcaaattcatacaccttttgatgttttcccaataatttgtaccgaccatcattcatgcgcgtgccacacaaatgttacaccacgaggtgatgagcccatccccattgcgtcaaatccctcgcagaaggtggcctctcggtcaatctcgctttatcgctgtcgagcgaacttctcgcactaagccggtatcctacgttcgctcatggcggtggacctcgagctgttggcagcagaggacgccgacttcctgctggacgactcgaccgcaagcgacgcgcaggcgcgcggcgagccagacgacgccatggccggcgtctggggcgacctggaggcgcagggcggcggaggggcccaggccgccgccgcctggtgggacctgacgctcactgaggccagcgcagcggacaagaagccgaacgaaggcctgggccccgtggatctgctgctgaccgagcagcaggcggcgctcgcggccttcgtggagccgtcgcgcgcgagagagaccatctcgcccgtggccatcgaggcgaagcagacgcgcactaaactggaagccaacgttatgagcaatgcgctcgccgccgctgccagacaagttgaagtgtcggatgattcgcaaacggagtcggaggctaacgtcatcgctcccacggcctcagcaatgccaacggcaacggcaactcgtgtgactagaaactcgaacaagagcaaacaaaaggcgccaaaggcaaaggtatcaatagagtctccggagcagaaggttgaagccggcaagaaggacgcaagcaagaagacgcccaaggtgcaacgcaaacggaaacccgcagcagcgaaagtccccgcggctgcggcaatagcgaagcaggaagtgaagttcacgccgctggagatccgccgcaaacgcaatcgagagtccatgcagcgtgcaagacgtcgccagcgagacgacgtggagcggatgaagtgcacgctccagcagctggagaaacactaccaggagctgaacgagaagtcgcaagcgagacgtcgacgcgcgagcagcagcaatagcaacaacagcagcagtgctttggcgctggaggcggattattatgcgctggcggatttatcgcatacgctcaaggaggagaagtttttgctggagcaaatgctcgtggagaagcacaagacccaccgacgattccagcaggtgatggtggatcgcaagcaggagctggagctgcagtgcccgctcaccacggacgactcgacgctgtactcggactttgaatatatccccatgacggaggaccaggcgaacgaacacatacgcaactgctaccagcaaatgcggctgatggaggagacggtgaagccgatggtctcgcactacgaggtcccggatggcgacacttcggaagccgaatccccgagctctccgacttctcctggcgctccggcacgcccaagtaaaggcaggcactgcgtgttcccgccctcagcgacgttcgggtgggaagttcgtcatgaagcgaatccagatggggacttttacgtgagcttctccaagttttttgctggcatcacaccgcaggaagccatgatgggcagctggacgaggtacgccaagcccgagtcgacaccgttccgccgccaactgcgctttgagatcttgcaggtcatcaacgacagcacgtacatcgctggctcggatattgagcaccccgtgcaacacgacaaggtcatgcgagtgattttcctgaacttccgcatgcaaacggacaagggcttcgtaataggccgtcactccgtgaaccccacgtcacctgaagttcgcgcgacggccgagagggactcgaactttgagtacgtcgataactccaactgggtggaattttctgctgaagaggacggcaacaccggggagcctggatgtctggtcaggttcatcgcacgcacggagtacaatacgcaggaggacatgtacgttcgtctcgtcaactcgatttctcgcactatgatttgggagcaggccgtcgtgccttcttcgtctctctccctcctgccatcctgatagtggctcacgtcggcgagctattccatctcgtcttcgtctcggtagccaccgaccagcaatttactagctcattctgctcggttgagtctgtcccagacgaagaatccattcattagtcgaacctgacgttttctggataggcaccactgaatgccatccagcttgcgattcaactttgcgtgttcgcttggatgttcacgctttcattttgtttacgtttttaagtaatgaggcgagttcaaccctcggtgaacgcgaacactgggccaatatttaagttttcccagctaagcagtccaaagatgatgtcgactgcagcttggatagcggcggattctgtggcatcgacgcttatcctgcccgtgatccgcacaacgcagcactcctgatctgattctgagcgcgcacccttgaagtctgtccacagcgacatattctctgcccaaatttgtcctggctgttgcgacggcttcgtactgaccgagcagttgcctatcgcgtagcctgagtacgtcttgagtcggaaccgtagatagtatgaagtggtaacctgctcttccactctaatgcgcctcctgaacacgtaagtgtcgtcgttgatcacctggaatacagtcatggactgtgtcgctgcgtctaccggtttgcggtaactctgcatggccagctcgttgtcccatgtatgctgcattgactgtagagcggtcacgtgatagaagggcttttcaaaggagaacagcacctcgtcgttctctcgatgatggcgcacctgccaacccaagaacggaggcattggtcgactagtggggtccatctgcctcagcgctgcacgctgtgaaatggcctgcaacgtggccgtcaccctctcgtgcgtcgcccggatgtaagcccaaacttcctcctcggtcaatggggtccacggatcgtgcgcacactggtcctcgaacacgcatttcctcatactggcctctccgtccgtcaggggctggtgaaaatcgtcgtacacgcgctccagcgtttcctgaagcttgttcttctcgtgtaaggctcgtctaaagcggaagttctcgtcctttagccgcgccccctcttcgaccagtttgacgtactctgaagacgccacgtccgaggaggcatcaaatgtaaagctccagactcgtttggcagctgtataatgccgcggttcacggtctcttggtatcgaacctctagacgatgcacagtctcgcgaagcctctgcatggtctcctgtaattccatccaacacgcaaacacgtacgtcagctcaactagcgagattagaagagaacgtcgcctccaacatccacataccctctctttctggcgcgccaaccgcatttggtctcggttcttccgcctccgtcgcgaccgcggggacagttgctcgctcgcttgttcgtcgtgtttggcctcgctgtcatcggagaccaccggtgaggacagcggcgtagccgcgcggtcgttcggagggagtttctcctcgccatcgctccgctctggagactccggcgaagcctttgttctggcggagacggcttctgatccaattgtaggcgccatccggcacaacttcgtatgaaccagccagaaggaggatttacaagcaaagcggaggtctagggtgggctacactgacgatagggacagccatctcaaggcggcacgggaccaatttgaactgcttatgcgcgtccccaccataatttgagcggcgtggatttgcctgctgccatcctgctttggcgtgttgcttgttgctcattgcctgaaaacacaccgcattccctgctattttctagccgataacccgaaagttatcataataggatattagcgaggacaacttgtccttacgttgtggaaatacagtgtaggagttgttgtacatgtggctcaatagtagctttgtttatgataaacctcttcaagcgaatctgcagtgctcgtgctcagacccacacgcaaatcaccactgcacgatggacacgttaatgaaggcggcgtaccgctcgggtacatgtaggcagcgctgggcgaaaggtgacgctcttcgcggccaggcgatgacgtcctcgccaaggaggaacccaaagcttgaaatgaccactcctcgtgggttgtcatttaacgctgcatgctaattcaaggtagttcttcacttagcaatcactcaaggatggtaattgcagtactgaaggggaaatctgcattatcaaaccaattgcactgcttgaaaaagattaacgttttagatgttctactctgtagtcgtcaacgatactcactcgtttgagatacggtcttgctagcgacgtcctccaagtaaatcgatctgcaagtcaatcctgaagagtgggggcgtcagaatatcctgcgtccactgactcatgaatcgtagcatttgttgagttgaatagtgcgttctcccgaccgtggcagatgtcgaggaatcctcgagtaggatacatgttggtctcccaaagcatgaaggacgacactttcttgtcgaaaccgacgtctgccagcttgagagatccgcgcggtgagctgtccacggtcacatgttcgccttggcattgactctccgtgtagagtgcaatctgtgatgagtccttcaacgccaaccaggaagcgtaagagccctcgttgctgaagcacgagtccaacgagtagcagcgttgcgctatgtcgaaccggaagttcctgtagctgttgcctgcactgagtgcgagctggttctttgccgcctgacaggaaagaccagaaagcactaacagcagcgctaacaaagctggcaagtgtaccgtcgtcatcagcttcttgcttggttgtgagaaattgagaatggcccgacgcagaatgctgccgaccgatgcacctccggatatgaggtgctagatttaaaggccggtttgttcgctcgctcgttcgatgcgccgaatatattgttccatattgtctgcttcttatagaatgttacttaaacgtgtgcacgaattgtgaggtttgtacattatcaatgtatgaattgtattgtgggcccaactaattgggttaacatcaaatttgttctactcatttcacaactatcggcctagttggccggtggtgcatttacgtaaatgaagtacacgcttttaggcgctaatactgtcaggcgcgccattgatcgtacccttgacagatgcatccacttgaattcccgagaacgtccagtcagaaacaacgttggggttcaccttgatgtcgtacaggttcgtagccgtgccggtgagtccagacaccgtcacacccgtgatctgcgcctgactggtgggtgcaccagtgtagcctccttgctgcttgctgtagtccgcgcgcacaacgacaccgttcttgacgttcgacaagtcgttatcgatgaactttacgtcggtaacaagacccttgagcccgataatagtcttaatgcggaggccgttgtcgctgtcgatgatgtggttgccctcggcagtgagaccctggaccgtggtcgtcttgtcaaccgtgttcccgccaagagatccgatggagataccatggctgttgtagcagtaattcttgctgaagatagtgttggtgctggactgcatggcaaggcagtcgtcctggttgtagatcgtgttacccgtgatggtaatgtggtcgttgcagctcaggtcgaagccgtccgtgttggtggcgacaccgttgccagccttggaatctagggtgaggccgctgagagtcgtgtactaatgctgaacgtgcgatacggcgagtccttgacggtgaaaccggacaacgttgagtgggtgaccttgtgcacctggaagaaaactgggcgggtggtcgcctggccctgcttccagtaccaaggaccctgcccgtccagcgtgccgtcgcccttaactataagctccgttccgctaagcatcacaagaggtccgttccacttctgtgttccgaacgtagttgtgcccgtaaattcaatggtggctccgttcttggcgccgctcagatccaacgtcacgccagcaggaacagtaagaggaccgacggtgacagtgctgcaggacgaaatgtccgtgcccgtcttgtaggtaccagtcaggttacagttgctactgctagtctactgctgctgttgttgctgttggctgccttcgtccttttgctgttgttgctgctggcttccttcgacttgctgctcctgtccttgttgttgctgttgctgaccgtgcttggcgccgtcggctgcttggcgcatcatgggcgagccattgacaattgccgccaaaaaggcaaaagtagcaatcgccgcggtcagcttcatgatgatgcttgggctttggctttgtggctttgttggtgtgcttctcttgaggcgaatttgaaagtgagggctagggtgccgctcgatgaggcagacaatggctgcttcgtatggctcgcgtgatcaaggaggctggcctagaaggatctaacatggcgcaacaccgacttgaagaaggctgagccgatccactttattcgtgcagacgactaccgtacaatcagacttgcattgacacgtcgcctgctgcgttcatctcgatccggatgcatcgaaaaacgtggacagccagcggcttggtgaagttgccactgcacgataatacatgcaggtatgtagtctgtggctttagctaagaaattaagacatacggaagcgaatggtgtgctgttgtttctgtattaaactgtacacgtgcacgcgttgattactttttaaggttgtcaacacaggaacaagtgtttctgcggaaagaggccccgcctcacctcgtcgtgccgatgaagtccacgcagggctaacgggttcttccgattaaagtacccggtagattttatttgtgatcgtatacggaactgatcagatcggaacaggtgtcttatcttggtttttgtatgggcaaaacatattacggcagtgaggagcgtagccatagcaaacccgcgcggtatttgcggaggcgggcccagcggcgagcattccagcgaacagacccgttgccgcaactcggagttagttttctttatgcgagagtctggggtgcaaccccagaacacctactaggagatctgttcaagtctctgatcagttccgtatacgatccaatccggaagtcctggaacatggtatattatcgcctataatacctttctacataccaaagccaagtataatgatttcccattagtacactctcctattatattacccctttttcagggtatactattactataataccgctacactaatccgtgcttaagcacggagaagctctggattttatcatgtagttttgattctaggtttgattctaggttaatttatcttaaatgtgcctagcagctctgcccgaggttctttggttagagcgaagtatccttaaatttcagcagttggtgttttttgtctttattcgggtttgctaccaagttccgaaaccatgaaagcatgcactggcaactatctcaagcccttacgcgagcatgtactggtcactcgctatgccttagctatcttgcaataatatgcagccgaaacgtcaaggcttgaatgcggcggtaacggtacgtatgcacgtgcagaatggttgaaacgagcacgtgcagaatggttgaaacgagaccagcatcgtttgaagacttcaacgacacccacgactttaaattgaagtcgtgggtgttcgtgggtgtcgtttcatgacttgaacgtggtgacaccgatgtaacatcgttgaacatacatgtactgcaaacacaactgcagttatgtttggagtcatggtcgagtcatggtcgagcgacatccgatcaatcgtgtcacgcgaatgtcgaccctaaaagactcaagcaacacgccgctggataatatattatccaagcgtttattaaagttaacgggtacgttccgatacgttaataattcgttcgtttataaccgatagcggagcatgcatttttatagtgatttgcacctgcagtcgtatcgccctaacaactctggataaaatccagaaaacactgttttagtttaacgaacatttaaaaaatactataagataacatcgaactgattgagagctcaacaagcatttcacgccatggaatcgccacggtacggagcagactagacctttttaatttcaaaactgcaagttgcaaggtcagaacagcaaaaggtaagatcaaaaattatagagtaccacttcgtttcaaaatggaagcatggccccacagtgaaggctgttccagccttcacaaagatagctcgaaactagacttggtttgagtatggacgggactgcggacatcttcaacccacggacttcttgtgaattttcgaaaagaagagcctagtagttatacaatattcaagtgtacaacgatcaatggctgtgtataaaagtacgaagctagcctggtctctgctcatgcagttttcaacttaccttttgcagttgaaagactgtaaacctaaacaaccgtaccaaatttgagttgtttatgattataatcgatatgcacgctgggaacaaaagaaacgatttgaaaggaaattaaatataggggttgaatacattgtaatgttcagcaattttgccgccagatttgatgtgttatctcggagtctgatttaccgaaaatggagctcctacaagataggtaagtccgatttagctatatctgacttgagttggaagcataagtctcaaagaggaggcattttaagctggtcatacctccccacatctaaggacacacgagaactcaaatacattgggggctatagtacgcgtatttatccatttcatggcactatggtcagctatagctcttgcgtcaccatctacagcaactacaacaatatcccacaacaatatgatagggccttatcaatgctttggcagtggtcacttttgccggcgataagcgaaatttctcgtcgcttcttcgcaactcggagcccacaggcgcaaatcgggcccggtgtatcggatcttggaccacgcaatttgctaaaacggatgaaagccaacagttatagctgtgtacaaagttagtggtatatcacataagaaagggtattggtaaatacaggggctccctcagccacgtgtttggctgcgggccgttggtcaggaaataaccagcacttcgcaatctccccgccagccccaatcagctcttccctctcccccttcgctctctgcagggccttcttgtatcagtggtaccacttgttgggctagactcgacattcatggcccctgcccgatcccaccgttgtaaaaagagctaattacgtacaaaacaccatgataaaatatctgattttgttgtttttacgtaatttacgtccaaattgataagtatcttcattctctgtgcgcattctaacagttatatttatgtctcatcttgtcagaattcggttaatatgctgaaattatactgtatttttgttaactgcgacatttctggtgtactattttgtgtttgtaataagtagtaaaatagtactgtagtactactactatagtattaaagacgggcttacgagcgaatgcacgagtgctagtacattttgtattatactgggataggaagcgaggaagtgctgatagcccagcccaaacaggattaattcgggcgccatctgctgcctcccccgtcggtacaaactggtcatgaaccggtagttttaaggttgatactgacgataatgatggctgacgagaatgatcgttttcatttgagaatcgctcgtgcttcgtgctaatagccgggcagatgctgcgactgcgaagcaggcgcaggagatgttcatggctcgtacattatcgaggtaccttttgattatttgtcctgtgtgtatcttcttatgcaatatataacaagcacaagcgtgctcaggcttgcttttcagttaggggctcggtgtacgccacaatggacgagtaagcacacccggtgaagtgactttcatgattctaaccattgttatcatgtacctatcccagccttagggaagccctagtactgatggtctactatagtatttcggaagaaaatcatcataatggcaatcccttgctgccggtgatcactggtactgcgatggagaaaaccgcatcgggatggttcctgttctgggcctctcggaccccagtggaggagcaaacgtggggtcagtttacccacgacgcccttgcgcactttgaagcgtcgaactacgaagaggtgctccggtagaagcttcgtcaattctgccagaccggtgacattgaggagtacaatgggaagtacccgtcgttgatccttcgtattgagaacatgatcgaagtcgaccaagtcaggtactactgcgatggactcaagcgcaccacgcaggtttacgtcaagctacagaacgccacgacgtaaagtgaagcaatggaccaagcctgcaagtacgagctgtcccacatcgccggatcgcgagaaaccagagtgtgatcaacggttccatgggtcgccgcaaaacaagaagccgttcagcagacaatcctacaagtcttgtcactacgcacctgcagagcgaaccaaggatggccctgtgtgttgccaatgcaacaagcctggacacttcaagcgcggccgcagtactaagctgaagggtgagcaggaaaacgaccagccacgccagtagaagagggatctgacgtggcgagcgctagcgaagaaggtttaactgtaaacgcagctacgttgaatctactttgtgaagacgctctcgtctacaatcgcgcaccattgttcgccgttgaagggaacatggagcagcgcgagagcaagattggcgccgtggttttgctgaatcacggtgctacgactggctatgcgtcaccatcctttacaaagaagaagatcactgtttgcctcgatggtgtaccaaactaccagtatgtcgctgtcgtgttctacattcccgatgggtttgattgtgcccttgggatgccgtttttcgcggatgtacaaccggagatcgactggaaacgtcgatacttcaagatggatgactccgttgcagcctcagtggtgggaactccgacccccagcgggaagtgcagtctgactttaggtatcgatcttcacaatgctgcagtcagcgaaagatcgcgtacaataagccatgattcttgtcgagccgtcgtgccagaaacaccgttggagggcgaagccgaagtcaatgaaagaccgattgatgtcgcggagaaattctctaagcgggggaagaagaatgccaaggttgaggcaatgttcactcttggagtagtcgactcggaaggagtccaaacgaagtacatcgcgcgaaagaagctacggaagtttctacgcctacctgcaaggaccagccggaacacaatttcatgattgcgctgacaaacaacacgatcaaggctattcagcgcgacgtcaggcgacgtgacgaacctgaccatgttgaaacgaagaaagccaaaccatttcaacaaaccgattgggaatcgttcaagaagaaccccgcgtaccccgtcattgttgtgtacaaggacagtgtgtttacgcccgaaccgcctgacagacggccgatggagcatgatattgatcatcgtaccgacgtgaaggacccgaacatcgcaatgtaccggcagcagtggagactctcactggaccagaaggccgagatcgacagctgggtgcaggaaaggatcgctaagggattcattccgccgagcatcagtcctcctgcagctgagttcgtaaatctgtgggatggcgcatcatacacgactatcggtatttaaacagccacacgatccgtcagagcgtattgatgacgggtaatgaggatgttttcgacagtacgggaggtgcctactacttatcgagcatggacttgatgtcagcgtactaccaagcgcagatgaaggtggatcacgtcaagtatacagctttccaagcaccaagtggattgtacgagtatctggtgttaccgaggggagtaagcaatgcaccaccgacgatgcatcgactgacttcttcattgctcaagggcctcccatacacacgttcgttctacgatgatatctatgtgttcacgaagtcgaaggacatcaacgagcacctgccctctcttcaggacgtgttggagattttgaagaagaacaaactgtatgtgaagctctccaagtgtgttttctgtgcggaaaagattccgtgtctgcgtgatttcatcgggcggaatgggtttcgcattgatccggacaaggtgcagcctatcggcgtctggcctgcaccacgaaccccaaaacagattcgcggtttcctccgtctgaccgaatacatacagcgtttttgtgagcggtactcagagcttacggctccactgttcacgttgttgaatcagcggaattcgaagacctctttaaatcccttttaacgcggtacagctgcagaacttcaaggcgttgaaacgccggttgtctgaccctcaagttctgcacttacctccaactttacgcggcatatgcatctgtgcacggacgcgagtcagtatgccgttgggggtatgtggagacggatcacaagtcacttgaaggtattttccagctgaagatggcgaatcggcgcctcgcgcgatggtatgatattctggctgagtactaaccgtgtttgtggatctcccaggcgctgagaacggaatcgctgacgctctgagccgacggcctgaccttaaaccggagacggagaatttccacgatttgctcgtccccagtttcaacgataccatctaccagctacgtgatatggagatcaagcctaacgtcgatctgatcaaggcgataatcgctggatgcacaaaggacaaggttatcggggacattccgcgcgcgatcaaaaggcgtggaactgcgtcagtagtgtgaggggcatcggagaagcagtacaaaccttacttcgaggcgaagaacctgatctggtaccaaggctctacaaacgagcaacctcgtatcgtggtcccaaacatcgtggcactcaagcaccgtatcatcgctgaagcgcccgatatcaactacggtgggcatcccggttccgaccgcacgtacctgaagcttcgctcggactggtattggccacgcatggtacttacgatcaagaaatacattgcacactgtgaggactgtcggcgtaacaaaccgcggtagacgaagacacctggactcttggaaccattacaaattccggatgagcggtggcgatccatttcaatggactttattacggacctactggaagacgtaactcgatttgggtcgttgttgatcggctcaccaagtggacacataccgcattgcaacgacgaagaaagtttcagctcgctcaagaggtcgcagctttttatcgaaaatatttggaagttacacggtatgcctcaaaacattgtgtcaggccacgacacgaagtttgactctggattttggagtcaagtgtttgagaacgttggtaccaaactgaagatgactgtagcatatcgcgctcaagggcgatggacagactgagagcaccaatcgtacgctcaaagagtacctgcgttgtttcgtgtcaccgcgtcaagatgactgggatgtacctctcgcgaacgctgagtttgccatcaactctgccgtcaacttcagcatcaatatgtcaccattcgaggctgacattggatatgtccctcgcaacccactagtagccgtagcagcaaccaatcgacttggcctgcgcagaagtcgacgtcaaggcaagttcactgatcacccagaagcactccttcgtcaatgtaaagaggccctagaggatgattaagcgcggatggcaggtgcgtacgatcgtggaagaacggagaaagtgttcaaggtcggcgatcaagtctacctgagtacaaagctcttggatacaacccacactggctttacgaactcccgcaagctgtcctaagtggatcggcccgtatttcgtcgttcataccgtccacaagcacgcatacgatactaacttgccacctggagtcaagctgcatcctgtgtttaacactgggtcactcaaaccctacggccctcacttgtctctcgcggccgagccaaatgattttgcatgacggtactgttggacagatcgtggaagtgattgtgagcaagcgcaagcgcctcagcaccatacagtaccaggtaaagtgggtgggtgacgagaagctcacatgggaacccctcgaaaacctacaccaagtaagcgacctagttcaagagtatgaagtgaagcgccaaaaccaaccgcgacaacgaaggtgaagataaacttctagcgacaggactggatatatttcgcggttttaacttcaagggtccagataaaagttcaagaaatacaaaagccaagatgaaaatgaagtcatacaattatcaagttatcctgtagccttgctgcaattagaccgtcgccctagcaaatcaggacacggcacacaaatcgaagttggtcgagccacgagaacgcatacttgagcaggggcatctgggcgacgttgtcgtccgaggcgaagcatccagccgtggtcacctgaagcatgaacgcgtgaggcttgcgctggggccccgccaggatgccgatgcagaggtacacctcgggcgttaacatcaggtgctccaacgcgaggcaggtctccacaccagacaaccggaactgggtctggctgacgcgaagtgtcttcacagtgctacgggcgcccagcaccacgagcagacaggttaacctgccgaatgaaggacgataaggtggaccacacgacaccttccgacgcgatcgcgttcccagcaacagcgcgtgcgcggtagaagtaaccgacgatatcatcgaaacactacgcaggaatccccagggtatcgacagcatgagcgagcgcatggaacgtgcagcggccatctccgcaggcaggccgagagagcgcatactcgccgaaattatcgtaccagctgccgccttgtaggcgtcgacaagctcaagatactcggcgaaatcatcttcttcgagcaaccatcggggctgccaagatccctcggtcttgcctatgacacgatgtagtcgacatagtgccgtgagacacgagacatttaagtccccagtcgatccgagatggcccagacgtaccaccgagcggtcgtcgcagctgcacggctggaggacttccacgcagcaacacgggccagaaatcgtcgaggcgttcggcctccggtcgagcgtgcagccgtttgcttcgtgcgtgcaacaccaagctctcgagggagtgagcggttgcgcaggactggaacgcaggaagcaagcagccactccgccttgacggtcgcttcgccgaggggttgaaggaaattacagactgaggcgatgcgaaggaagggcaagattaataagcgtgaaggagcggccaacgataagaagccgaggacgagcaacgagcaacggctaccccaggacgagccgcggcacctcggcgagccgcagcaactcgattttaacttcaacggacgcattcagcaggtatgaaaggacttcaattggtggagggatgagtgttacagttattgctgcgtaccaagttagtggtgtacacatcagaaagggtattgataaatatagaggctgcctcatccacgtgtttggcagcggaccgtcggtcgggcaatgaccagcacttcgcaatctccccgccagtcctaccctccttcgctctctgcagggccagcttgtatcaattggtattgtgcatatcaaacaaacaggtatgctggggtataattgatggatgtttgcaaatgacatacagattataaattcagactaatccaggttacccagtgtggtcagggtatttgcagttttcatgactgaacatacgtccgtagtaaggctaggagaacaaatagatttcattgtacaggcgtccaaaacaatagttaagaacacttaaccattgtaaataagttcaaatgaatactggaggggcaatagtgtttggcctcattttccatcctggagtgtgacgaggctgagcggggttttgccccaacggtctgtcttagtaccagtccttgcatacggataacagcttcgtatacgcaaaggcggtctcggtcctgacgaagatgaatgctgtttatacgagtgcgaagcggtgtaatgaagtccaaacgtgccaaaagacacaagcgcccaaccaccgaagctaagcttgtatgttccatctgtgacaacgagcaactcaccattttgacctaccactgttcgtggtgctgctcgaaaaagctttcgcgaagttgagatgatttcgaccgagacgtcgccactatcagtgagcagtccagcactatgagctcattttgaagttcgccaaaaggtttggtgagcgatgtgccaaatgtcgcgtttgcgactgccgctcaagtgtattctccgtagacccccagcggaaatcatcgcattagcgatccacacacataccgggggacgtagagatccttccttcgatgacaggcgctataggtatccaagacgaaggcggagccagaagttcacgaggaggtgcgtgttgaggagcagaagagttgattgtaggccatgagaggttgccggaaaaatgcgtgcgcaaggtggatgtgcaacgataactgaaattaaataaacaaccgtaacaacaaataaaataaaaaacgatttgttaaaacattcttctccggcccgcttcagaatgacagtttcggtttatgagcgatattatcaaagctacatctcatctgtaagaattgagcacaccgttgaatacctctcagtggcgcgcagaggtgagtatttttcttatttgcctagcagcagaatcaagggagcaagccctgctctttggtgcctctttccaaaggtcattaggttttttatcgcagttcagtcaatttttagcgatattacaccgaaggtttaggtcacgcagaccaatacgttcttaattgcggggccaacagtagaacaaagcagggatgcgtccagttaaaaacaaaagtaagggttattgctgaagtcccagtaaataatgtgtacccacacgttaatttgaccaatccgcgtgaaccaactaattaggtacggaattcgggaaatgtaagggtggaattgagattaagcgtacaactgcatgtacccggccgtcaccgcatccgttgcgaccactatcgacatgggcatccgtccaccgactgctacatgcatacccactcgcggcagtctgaagtcgttttccccaccactccgtagaatagcctccatcatcttctgtagggtgacaaaacacttatccagtgtttgccacggaagctcgtcaaacgcttctgtcactgcgacgatgaggctattggtatatccatccgttactgtaacgcttgaattggttcaaagtagcccaaatcaagaacgttaacctcaggtgatcgaggtggctggcagcgcatcttaatcttccacccctctactctccctgctgcctccaactcgacgtcattgtcgaggacatgcggtctcgcgttgtcttgctggacgaacacagtcgagccccggcgaactacatacataacatgacagttttggtcagttgaatccatgagcagtcgataatacaaaaacaattacctgacatcttggctctgatagcgggaaaactttttcaacaagaaattgccgataaagtggacgtggcattgtcacacatttcgtgactgcggtacctctaggcctattaacggagttgcgaagaacctctgttacttccacgataggccagattcctaacttaccatcaaaatatttcttgcgacggcagtcgtagcgctgacgcgctacaactgccagagacataactttacctatgtactttttgtttgggcacgaacggtaggaaagctgctccgtagccgtcaagtagtatcttgtagcccctttgtagaggttgaaccacttttcatccacatgcaccgtgtcgtacatgtgatgcgtgcggtaactgtggccacctataatacacattttttgaaaacattccagccaattaaaaaaatgaatgtgttgatggaccaaaataatatcaattgaagttagaactaaatgatagcaaaacaaacaacgatcgcgtcgctcttgtacggtgcctagaggcatgctcacgggggataacgcccactgtagacgtctcagcttgtgggcagcggtgagtgtcggcttcacgcgcgacgcagcacggcgaagcgatccgtcggcaaggtagcgctgaagtgttgtcctcgggatgccgctcgctacagcgagtgcccgctgtgtctggcgttggcacagcagtacagcttgtaccagctgtgccacctccttgggcgtcagccgtcgtccgcgcggagccaccatccgcctcggagccgccaaagccccgacgtcgtggtgattgcgccaaaggttcttcacactgttgcggctgaccccaaacgcagtcattgcagtgagaatagctccgcggagaagcgtcccgcgaacgctccgctccgcgaggaagagcacgacgcgcaggcgggttgcaggcggaatgtcagcttgaccggtggctctaggcattttggtgcttgtcgatcgttggtgggcgagggaaggaaaggtaagtgagagttggtctcgagcgagttagcctgcatgatgccgttaattagtggacagcacctttctttatctttacccaatccggtcaatcgctcgattaattgcgatctcagaaaaacctcaactgtcattttgaagcgggccggagaagtatccagtaagataaaattgggaaatgtttggttcctgaatctgtagttatagatagaacggaagagagatcaggaacggtggtttccgagcgcgccagtgcaactccccaccagttctgatctctctccgagccgagctaccaccttccgccccccgccccccccacttctgtcgtgcccgctgaccagcgctatggcgcctccgaagctttctaccaacaagtcgacgaaacgtcccgctacgacaacacggacacgggccggtaagatgtcatcaaagtcgaagaagtcgaaggctacaactcgagtatcgacatcagccactactcgccgatctgcgcgttcaaccagacaggcgactgaaccagggccaagtgctcgtagcgagactagcgcagcggtgcaaggcagctccggaaacgatttacccagcgggggtacggagccggtcctgcaggaactgagcgaacttccagtccaaccatcccgtacacaacagcgagttgcccccacgggctatacagaaaacgactcgaccgagacggattacgtgcgatctaatatcgacgcacgccgtgattttgacttgcgcgagctgctatcgagtgcaagccattcaacgcatgtacctccgtctgaactatcagcgctggctcaagagttaggcagcatgcgggctgatatagcggcactgagatcaagaccagtggcaccagcagcaaccagcagcggcacttcagccattggagcgcccccaacacccacagcgcctgcgaccataacggaattagtgtccgaagtggggttgttacgtgccgagttaaccgcgctaaagtcaggcacggcggtgtctacttcgccagcgttgggccatatttccgcccctcatggcccggtccaggagcgagtcgtactccctgaccatgacggccaacttccaccagcaccgatcagaacgattactagcgcggacttcggggcatggaccaagaaagccaagtcggaatacaacccgccgccaatgcacgtgacagcggcgcacagaatgtttcccggtattaccaacagtacgtacgcttacccttgttcactacttcatacggtaagcacggacgaagcgatccagttcgacaagtcagaggcgatcctcatggctttggccagcggccaaattggacgcgatggcgcgtgcatccttcattttgaacggtccagtgcatccaactacgctgccaaagtgaaacagcgtcggcttcttgcagacttcagtggacatgcaacgcttccagtgatcaaacgattggaacctggccaacaaccactcacgtatgctcaccttcttttggcaattgaaggtctgggggtctttaccaggcgctactgcttcgattttattaacgaaatggtgaatcggctccgcgattttgtcgccaagaacgctcagcatgatgaacgtgcgacgttaccgcgtgtgatgctgacacttcacaccgtcgatatgtttttgtcccgggcgctcaaccaccttcgcagcgatagtccgtcatggtgggctaatttccgcgcagaagttcaaagaatggattacaactcgaccgaatgggtgctactactctcctcactgctcacgtcgacgccagcgcaccagaccacggcggcaagcccgacaaaccaccaagtatcgccaagggcgaacttcaagtcagccccacgacagcgtcctcgagatcaaaccagttacgaacggctgcgaggttttcctccagacatcgcggcacttgttcttcgggtcaatgggaaggagccctgcctccggtttttctccggtcatggatgttatgtcaagggcaagtcgtgtggcaacggtaaaaggcttcactcgtggcaaacaccacttccggacgctctggtagagtatatcaagacatactttgctcctaaaccagcagtccctactaataagtgaagctgcccaaggccctctcgtccgtggggtcctctgggaaacggtgatgctgcaattatgaatacatatacaaaccgttcggcagcatccaacgggccaaacactccccggttactatctcgttcagctcctagggtactactacacccgggtgaacgaagccgtgatttcccaatcacccaacttccggagggcggggcggtctctctacccaacaatcacgaatgttccgccgcatccaggacacgggatcaggctcacagtgcagcttcgatggcatcttgtcatgattgtgctgagctgccttcattatggacgaatcacgcggcattgagatcgaattcatcgcgtatcaattccccggtcacgttttcatcatctaccacaagccatcgctgggaatcccacacagccaaaatgcggagtttatctctacaacgagcgaagacatggaccgagattcgtcgacaaaatctcaacaacgctctgaacaaagtgggcttatcgctgccagtgccatcaaaatcatcattacctgcgatcatcgatacggcatctaaatcgaccctcccagagtttatacgaaagactcgacctcaacttcacgagtttgtcgagccctaccggtgccagactctggatgattatcgtcccaacaagtcaatcgtacctgctgtaattaaggagtcttgtgcttcttacgatcaactcgaacgcctactggactacgctgaaaatggagttgaagtgaagctgtcgcgacccatgcccgaccaaacacgacgtccggcaaccatggctccgcgttacaaagtctaccaattctgttgcgcaaccttcgagctgaacaagacgctggtcatgtgcttctgctggatgctgatattttggaaatctggccgcacattcagatcagcccgtttggcatcgtcgtcaaatctggaaaggacccaagtgtgcacggtagaacgatacatgacttatcatttccaccaggcctgtccgtcaatgaccacacggaccgaaccgcacttccccaaccagcctacgagtcatgtgcagtaattgcgcatgaaattttacgccgtcgccgtctcgagagccatcctcccaaaattctgactggggatgtggcatccgcgttccgtcacgttggaattcactgcaagtccgtatacctttttgccggcatgatccttgagctgaacttgcttattatcggcctctgttgtccgttcggttggaccggttcgccaagttgctacgaaactttcggtggagccatcatcacccatctacaccggactacctcaatcactacgggcaacagcaattttggctaccactgggtcgacgaccacgtatgcgtggccgtagacaacgagatgaattgcttggagattgagcatgcgttgcgactggctatgatcgacatattgggcgctgaatctatcaacgaagccaagttctcagggtggcatcaccgattaaaagtgcttggcctcattttcgatgcatcggcctctactgtctcaatccccccggagaaactcggaaaagcacgaaatcttgtctcgacaacttaccacaagtcatctgtatcgatatcagaattccgttcgttgctgggctctcttcggcatatttcaacttgtctacgccccgctaggcctttcctgcagcggcttcaccaacctgaaagaaagctgctgcggtatacaaaagttcacgtgatcgaccgcatgcggcaggatcttttgtggtggtggtcaattctccaacaaccagtactaaaccacttaccgatgcaatattttcatggagaacccgcacccgatttcacggtagaagtcgatgcttctgattatggctgctgttcgctagacgtcactcgcgagcgatatttctcctaccagtacaatgaacatgaactggagcagattgcgttgtttcaccgagactcgcctacttgtttcgacataaactatcaggaacttttgacgtgcgcctttgcggcatcggtttgggccacacattggagtggaaaatctgacgcagagctggttcactttcgtgtggataacatgtcagcagtgtcgtggcaacaaaaactatcatcgccaaatccgcttgctcaagatctgattcgtcttttaaggtggtgggaagttgaacaccgaatccgattttcggcctctcaaatacctggtatcgcaaatattcgcgccgacgctggttcccgtgcttccgtatcgaaggtcaagtcggacttattcactaatcttgttgctggttggatacaggacaatccccccaaatccgcatccacgatgacagcacactggcgatgtatctgcgcgagcactccgttgctgatcccacccacgacaagtacaaacgggccttcggtcgatgggaacaatggtgcaagcaatttggctttccaatctggctaacgcgggttaataccgatcagcaagcggttattgtctcggattttattgtttcgtgcacacgttccgggcgcaatggacggcaaccgaagagcgataccattgcaaatacacttcatggaatcaatcactttttcaaggcacgtgcgcttgcgtttcctgtcggccatccacaagtatgcatgctcctcaagggtcttcgtcgattggacactccggagcagcgcaaagcaccggtcactctatctctgctccgggctgttttcaaccgtctcgatctcaattccccagcgtatcaagcattatgggggcactgtgtctagccttcttttttctacttcggaaatccgagatagtcgcagatggcacgcacttcaagtggtttattttacgtcatggcgatatacagctatttggtcacgatgggcggccgactggcgatcggctgcggcagcctcagtatcgattaaactcacgggtcgaagacgaaccagactggaccgctgataacgcgttcattactgtcatccggagacctccagatttgcccggttttaggagcactctgtatacgaagagcacgcgaaatttgcccgatcacttccccgctacaatgtaccagaaccgcaagggcgtacccggtgtcatctcggctgagcgtatcatcaaaagtttgctcaaggtggctcatcaagtgggcatcgacccacgttctatcggcactcattctctacgagccggaggtgccacacacatgcatcgcgccggcatcgaaacaaccaccattcagctacacggtcgatgggcatctgatgctttcaagcgatatactcgcctttgtgaagactccgtcgctgtgattgccaagcgtatggtcaccggatcagctcacaatgcatcactcggttagcctcgaatgctatgcctgctctttggggttgcccacaattcttgagggccaggctgacattctaagctatcgagtaaatacattgcattgttccccatacgcacgaagcagaacggaaatgtaaagttatctgaattcttgtaaatgctttttcagacactccgatttggaaggggacttttttggaatcgaacatgtctctttgcgggcatcgtaggtgtctacgaactcggcggagaacgcctcttaggcgactcttgttttggtggaggtgtcggtgctggatcgcgctcaatgccgtagtgggaaagctgatacatgtattactccataacttcaatttcctcgtcgaggtatcgaggacgagcaattagccgatctcgagcgcgctctcggcctttcaggcaacgcgcgagaacgttcatgtgcgcttcgctgtcttcgttgttgttgaggaagcggcgtcgaggcttgcgtggcatggcgaattggtttatgccatgccccaccaacctcgcacggtaagtttcagaacaagtaacacctaggtgaaaatatatgatagcgacttctgtacttcaattgtgatcaacctgctccgaatctgctccgaactttaaaggtcagacatgttataaattacgctaagttacagtgacagaaactggcgtcgatgcagccctcctaattgtttcggtacagcaccgaaccgttaaccctacaagacctgaaccgaaaatatatgcaatgcatggaaacaccatttcaaatgtctgactggtataatcgatcagaaaagcaatgcagctgtcggcaaagcaatgtatccccgctaatttggaaattagccggtgggaggatgaaaaacgattttccgattgacggtttgatgaaccgaaacaactatccttaacatcggtgaagactagtccaccaggcgcaaatcgcatagcggcagagagtgcagtaaagtcaagatctcaccgcagttagcaacgattggcagcgggatgtcatggtcgcgccagaaacgagtccagctgacccttctatcgtcgacggactggcaagccgccactcagatggcgaccgagtgcgacaagccgatcccccccccccacatacacacacaactcgatactcgtagggacccaagccaacaggccgacggataaggaccggacggcgtaccggcggtcagtagcagttgcagtagcagcttgacaataggcgaattcaagacgaagctagagctgacaggctgtcaacccgacattcgcacccacaataagcggcttaactccaggcttcgtaacccgatgagcagatcctacgcgcatggctggaacgacacgagaaagacgggcgtgtaaaaccaacagagtgacgcaagttatcaagtggtgaggtggagaacccaacctcaactcgacagcgtgcaccaaggacaagaactgcccacaagacataaagacgacaccatgcatatacactacccacatgtagtttatactataaatccgtagcactcgcccctttaaagttggatagacgctcatagtatgaaggatggaccttaacggagcgggtgttacggattatagtaatagaccggaataagagctataacaggcaaactgggggattgcgcgctttatcgatcactcgtgtcgtccaagaatacagttccggggggggggggcattccgtacgatctacgtttaagtccttgtagtcgatacggagtatataaccgctaacgatgtgcggacggtagagtatggatcagatctgtggtttacgtgcatctgtggagagtgaaattgccacagcaagaaccaagccataaagttggaagttggtcggtcaaatcaacgggaacgttaactgtatcgtctaaaaaaaatgttagcggatcataggcgccgtcatcattgatacagcgcaccaaaaagctggaccggccacaagtctaataatcatgctaacctgattccggttttggtgcatagatgttactgaggaaatcaacggtggtatcgttttggtgcctcggacgcctgaggaaacctcgactgcagctgccgagtgtagcattggagtcacgtcatgatttgtgttggctgctccaattctacattattgagcctgaatgcaaacatcttgctcccaaattgaacccggcacgcgctcgcggacctccgcagtaaggtatgcaaaaccaacccatcaacatgacatggtggtttgaagcctcggtgggtaactcagctgaatgggttcagtgggcgagccatcaggtaacgccggtcacgataggcttgatttgataccataacacactctgattgaccaggtgaagaatttttaatcggctaaacatgttgtggctctctacacattctcgatcgaacgcaaaacgtccgcggttcaggtgaacataccgccgcttgacatgggacacacacttacccgcttgaagtatgcgtgctacaagtacctctttctgtgggaaacattccacgggcctgacgagaagccaaagtcgtgtccctcgcgcaggtgccttgagtgcattgtcggacccatgtctgcgtgctaccggaggccgccgacaatgtcaacgcctgagcaagaagcaacataactcataagtaaaaccaaaatgcagcgctcccacgagctaaaaccattctttgtgtcttctaaagcatttttagaaagaagttaacattgatgcaccagtagtctaagtaagaaaaaacataacacaagatacgtatgctttaacaactagctgccgaatggacaggtgatagatttgtcccggtagtagagatttgagcgcaccatggcaggttcgcgcagtacgacccagaacggcctgttacattaaaattaagggtctaccgcgtagtcacttaaataatacaaccactgtagctttaagatggcggacggtggttgcgtgctacacctacacctcgagtcgaccaagcggtgtaccgcgtgcgctaaaatagtgcgatagaacaggcgcatacgacaacgccataggaaagcgtgataagaaattattcgagagcatatccctcgcttagccaccttcactcatggttagacaacgaaaaggagacaagtaacgagacatgcacaagtcattcattgcctctgattgcctctgcttgtcgtattgtatggtgcatgtcaatccacttcagctttaattgttagacccgattcatttaatatagcaccgccttactgctgagacagccggggcttaacccactaatgtcactcactttgcaatttgcgtccatcgcggctcatcttcctcaaggcctctatggacctctaaaagcccccaagcctcacatctggtagcacttgttggtccattttcgccgggcaagtggtcagaagatctacatcgaccgactcgacttcctacgttcggctctgctgctataacctcagggttatggttacctatttcactttactgctattctagatgcaattaaactaagcggcataaaggcttttcgctagccataacgtgttgcataatagacattaacgcttttcgctagtcgattaccctcattagctttgcgcctgtcgcttcactagtcaccttcccgcacgcaagcctaatatattacggaaaactttgttttgacatggccttgaatgaccaatgcgaacagcaaaaccctaaaaatcacgattgaaaccctcgccaagtatacaagcagtagatagacgcgaccgagacacagatttcgccaagttccatcacaccggcggtggggctggacgagctgctgaagcatgtcaccccaccgtccaataaatcggctgtggtccgcatggacccagagttgttgtatgctcatgggctaagagacttcaaggggataaccatttttatgggtcaatcgctgcgcaggtcaaatttgggtcaacgctttttaacgcttttttggtcaaaaatggaacaacggaggtctacacggttttttggtcaactttgggtcaaaaattattacccccaagaggttacacgattaataataaatgcaagagattgggcatttttttaacatattatatatatgttgaggatgttgtgtaaaatttagtgttgtgtaattgcatgagtgccgtgtacttgctagatatttgtattcggttgtcgtcgtgtgcggttgaagtttgaagatgttgtgtatttgttggaaacttttgtgtgtggttgaagctctggcgttgttacatatttgttggtcaattgtgttttgattgaagttttcatattgtatttgttagttagtggcgtgcgtgttaggctgttggcatgtgtatgatacactattgttaggctgctagtttgtaagactgtagtgtcgagcatccctatctcgtcagtgacacaattaaccgcagagtatgttgtctcatcgcgggtgctatgtcgtcaattgtagtggttgctccaaccaaatcgtaacattcattgtgaaatctttaagttctaagcactaatcccccccttcccgcccccacgacgcccacgcaccatggcctcaggctacatctccgacgaatcgatgtccaactcgctcctgtccgatggatccgagctcagcgacaccgagacggttctactgctcagccaatccttgggctcggaacacgaagagagtgatggtacccaacttgaagtcgcgccgccaactgaagatgcccactctactggcctcgccgtcgccaattctggatcagggactatccattatggtggctactcgtacgcccaataccacttcaaccctcgaaccgacaccaggcgctatcgatgcagcgcctaccgccgaacaaattgcaaggcgaaattctacgtgagtggccgtggcgctgtggaggatggagcacgagcccgcttgtgtacctggtttctgtcgaacctcgactggaccggcccctgctgttaccgaccgaaaagaggggatgctgctgatgacggacacaatttggatcgtatgaagcagcggcaaagttcagtcttcatcgactcaacttatcgttgggtgcctgctccattctaccagttggagattgtgatgctctacgatttgatttcggagctctttttgccaatttggtacgtccttacgaccgggaaaacggctcaggtgtacgatcgcccgtttcacaacatttacgtcggggcaaggcagaaaatctttccagcgcatgttgtgtgcgacttcgagttcgccatgatcacgtctgtccagaaccagtttccagaatcccgaattgttggctgcctatttcactccaagcaagcgctccgtcggaagatgatgaagttgaagatcacggaagatgaagtggacttgaccatgcgggagggctgcattgaccgctgacggttatccgacctatggatataccctccgaggcgcccacgaggtccgatccatgatcaagcgcgactgccaagcgaggggtattggttactcctggtccaactggacagttggaagttctagaagtacttcaagaaaatctggatcaacaagttcaagccggagtggtggaacattaacagtgtgagcgaagacatcgtaaatcggaccaacaacccgcttgtacgctagcctacgctacttcctaagatgggccgagttatgcgttgtgggaggtcctggccttcttcgatgactttgaagaggtcgatgacacgtgagagtcgatgacgagcgagtgcattatctctgtcaactacattgacgtttgtatgacgcacgtcaattcacttcaacttgaagtggattgaccaatcagattgatttactctagcaccgcattgggcactgcccagacggccggccacagggctttttcgaaataaactcactttcgaattcgcatccaaccacctcaacggtttaggcatcgcggtcaacacttcctcgcggcctctgcgtctcctactgatcaagcctcacagataccatacagcattgctggtatcactcgggccttattaacaaggccgccatcaatttcttgacgagctaaatcatatcaatacattgctttttcctaaccaatcggattcaccttatactcttagagaccttatatatatatcaggtgtccggtattcacgcacattactgtacatgaaaatcgccaaggttgtcaaaacaagctctttttttgctgctgtacgccgcttggtcaactattttcacaattgtgccccactgaataaggctggtttaaccatacaaatctctgtactaaatttgcatccttaccgatgtggcaaatcatgttgcagaaactgatctgacatgtgagatgaccaccccgtctttatcgtccgcaactataatcaattgtcatgcccagcacctctggcctgctgagcaagcacgtcagagcgatgcggagcaaaggctcgggcttggttgctcgtgaccagaggctcgacacgcatgggattgctacccgagagggtcagcagtcacagcgaacatgcattaagtcaaaaagaaaagaaatcagaaacagtgaacaggcatttagtaggaaatacatgaaatcaacacaaagagacgaggacaaacacataggtaagagacacaacagaaataagcaaatatcgcgctgtgctcatctaggaccacagcgaggcatgcatgttaggctaaggattcattcgcaaatacacctcgtgtcccgcacttcgatctcaacaaccaagtctacacttcctggcccatcgaccaggactcttcaccttaaccacctacactccggagccaaacacgacatctggtagcacttgcggggggaaggctcgccgctgcacggcacttcaaggggaggcattttcagcttgcggtgtaagtgtcacgtcggcgtgaccaacccaactgttggggagacatctgtactttagtagggcaacctcttactgtacgctgaacgtgggaaagaactgctgggcagccgtggtgcaagtttgtctttcaactggccccggtaacagcccattagcccaagtagctactgttctaagaagactgcaccgcaactaagtcgagcactataagtctcgaagccggttagtcagtttttgatcttggtagcccggcacagcactaacttcgacttgctgtttctggcccggtagggctaggtgatgacgagagcacactccaaggtccacaaggacaagaaaacgaagctgattggttcgttcctgaggcttgcggttaacaacccacgcaaggcggacaaggctcggcaggacctctacaactcgatagcgaaatccgatcgtattctagaggctctgttaaagcaggtcaaaacgaacaagactgagcgtccggtggagaagaaggccatcatcaagctcattaaggcttcgcaaccagacgtccacaacgctttgtaccgcgtgtcagtgtccatttaccagcgtctccgcgagatcgagatcccagttcctgattgagccgaagaggagaccaaggacaagaagcgtcaccgctcgacctccatgtgcatgtttcttccttctcatgagtgaaggtgcctaagctagactcatgcttacgccctagtcttgcacttgaacggggcgggccgacgacgtgctcgtcacgtctcgatccttacatcctcccgggtttgacttcacgttgacggcgcttgaagtcgtcgacgagaactttccagttcgagacgtgtttgatgtctttctcgagttcccacgaatattcgtggtctggaagaccatgccacttgacaagccactcaatcttgcggttgaactggcgcttgcgtagcagttgctcgataatgtggaggtcttctccagtgtcttcatctgtgatgatgcgagatgctttcggaagaacacgagtctcaaccttgtccgggttggagacgtaatggctgagaacatctacgttgaaagtagggttcaacgacttcatactgcgtggcaaaatcaagacgggcagcgttgtcgctgatcatgcgcttgatcacgaacggaccaactttacgagccgctaactttgcacgtttgacgtcaatgtctttcgcagtatgcctgagtggaatacggcgtgtatcaagcataaccaaatctccttccttgaattggacgttgctacgacgttgatcgtagtacttcttttgcgatgcttgagccttgagtaggtgttctttggctttgccgataatcttgtcgcgttcatccttaaagcggtttgcatactcagacagtccttgttgtacttgaactgtggtatacagcgtaggaaatgttccgaagggattgcgttcgttacgtcctgtgtctacttcaaatggcgaaagtccggtagaagcactgactggcgtagcgtgagcatactcaatcgttcccaacttggcagcccagtcatcaccatgatacgagaccatgcaacggagtgcatcttctagtaccaggttttgacgttcggtttggccgtcagcttgagcgcagtatgccgttgtcatattcaactgtacacccatgatctgcgcgaaagagttccaaaaacgtgacgtgaatttgggatcacgatcactgatgatcactgcaggcactccatgatgccgaacgacattgtcgaagaagtaatgagcgatttcttcggcatcatcggtagtgtgaacgggacagtagattggacgcttggacaacttgtccacgacggtcatgatagcatcatagccgtcggattctggcaatccagtgacgaaatccatggagacgccttcccaacattccttaggaattggaatcggaattagcttgccattcttcttggcgttgctgtgcttccaacgtgtgcaggtttcacaactttgcacgtaatcggaaacgtcttcatgaagcgacacccagtagtaccattgcttgatacggagatacgtacgacgaattcctgggtgcgcggcaatactgaaatcatgaaattgctcgataatcttcgttcttagacgattgcgctgcgatctcgggacacaaagtttcatcactttggactccttgtcgtccgtgaattgcacataaagcaatccatccttgagtacgtatggatcgtgtggagaacgacacttgtctcgaaatccgggatcagtgtggtaggctttgatgaactcttgtttgagattcgaagtccatcctagcgaacttgcgtgttgcatttgcacaaccgatgtggcgatctctgcatcttgaacagggatgtggagataaccatcggaaagatcatgtatggcgaggtgaccagcagaagcatcagccatctcctctcccgaaaattcaacaggcgagagagccgaagacaccattatcgtattcaccttctgatgctgtcttgcacgatagcgtgatgcaaaactgtcacactgcggagtacacgtgtgaaagttgatcgtattgatagcgggacgcacaacactctatgaatctggaacagtcgagctttcactgtctgaagtcgacaacgaagcattaactgcgtgtagatcgcacactactcgaaaactcgatgtcgttttgtcatcgtctggctcgcaagagatggagccaatactggtgatggaaacgcattcggagttgagtccattggaggacgggacagtgcatcagctacgacattcatcgaccctttcaagtgatgaagtgtgaagtcgaactgagcaaagaaggtcaagaagcgtgcaagcttcgaagaaacattagggtggtgtaacaaccactgacatgcactgttgtcggtgtagatgtcgaaatgacgaccataaagataatgacgccatttttccaacgacagcttaattgcgtagagttccttctcgtgggtaggccaattttgttcatgcacacccaacttcttggagaggaaagttaacggatgatcatgttcgttgtgcttttgcgaaagcactccacccacgcaatatcctgaagcatcggttgtcacgatgaacagaggagagaaatccggtaaagccaagactggggcggattgtagtgctgttttcagtttgctgaaggcgatatcatgctcttcattccagttccaggtgttgtccttcttgatcagagatccaaacggtaaggcgattgtcgcgtagttgaaaatgaagcgacggtagtagcctgcgagacccaaaaacctttgtaattgcttttggttcatgggaactggccaattggcaatcacttcagtcttcttggaatccaccgcgatgccttggctcgacacggtgtgacctaggaactgaacttgattttgcccaaaatgacacttcgaacgatgacagtacagcttttccctgggtagcacttcgaaaagtatgcggagatgctgcagatgctccttcatgttcttggaaaatacacaaatgtcgtccaagtataccacgatcaacgcgtatttgcccaatagaagacgtgaccagacacctggcattccagcaagacccattggtgcaacacaccactggtaggtctcaaaatgagtgcggaacgctgtgtactgacgactcttcaaggcaaccctcatctgatggtaaccttgcgcgagatccaagactgagaagatgacgcatccatacatcttgtcaaatgtctcgtcaattctcgggagatgaattcaggcgatgatcgtctgcgaggtgagccaacgataatcaatcacccaacgaatcggtaacgtggcgtttcccgatcgtagccactcagctcgagagagttgtttccataatttcgggtccttcttcgggatactaaagatgttggagacccagggtgaatcggatagttcgatccaacctttcttcaacttttcctcgacaaacacgtggttcaaacatgtggctcccgtgtctagcataatggtgacacgtttgccctcacacagacctggcttccgaatcaactcattccggagctggtagtgactggattgtggcagcattgagatcatttatctcaacaacttcaaccgattctggcttctctgtggccaaagtgtgagcagcgaactgacatcgcttggtgtcagactgatagctgttgttcgatatgtgcttctgtcgattttaaagtttgaagcactgttcaatcgtatggccaagcttcttacaataccgacacttcttgtggttgccactgttgcgattgttgctttgaacagggcgacgataattgtcacggcgtggactatgcacatgaccggtgtcgatttccataagctcaggttcattgtcagcaggacgctgtgaagccgtgttggcacgagtgaatggtgaggagttggcacgtccaaaagtccttggatgtgtccaacgattcttgtaaaacggaccagcacgaaagtgcgatctgtcatactcgagtgcaactgagagagcctcagataccgtcgtgcaacgacgatactgaacttcttctttcgtggggctaacaagacctcgaatgaagtacgtgaccttgtcaagctcactcatgtccttgacttgcatgatagcaacgcggaatcgagagatgtagtcctctaagctagaacaacatttttgcttgagactgtacaatcgatctcgaaggcgctcctgaaggtccggaggaacgaattccttcgtgagcttctggatcaagtcttgggcgtcactgatggaatccctgcaaagcatgtaccatgcagcagcatttcccctgaaattggcggtcatcatggcaatactgcgcttactcagattctcatcttgccaatcaatgttcttcgcctcaaagtaatggacaacttggtcgaaatacaactcaaccgagtcgcccatgtttccatagaagcgaggtaggcttatgccctcaactttgacttccttgcgtggcgaagtcaaaacgtcgattagtgcttgttgcttctgcaccatttcaaccacatactgggtttgacggtcagcagaccatccgccaggattcaacgaagtcatgatagtgtaacttgagcgaaaagctgattaaagttacgctacgaatgcaagctactagctactagaactagagctacgacgacactgtcaacaactactcgaaacgcgcgcgcttgatgctgatgatgcgatcaacgaaggcacgaactttggtgtcgatgcggatgacacaggtgttcaagttgtcgacggtctcgtagagaaacagtccaaactcagtctcgatgacacggtcaaggtgagtctcgaaaaacggaaagaaaacttcacgggggtgatccgtcaagcaagtaacctcgtactgcaaacgggtagcagcacggatggtgaaagcgcgttgaacggcttgttcaatggtgagaatgcgacgatgttggtgatcttcttcccactcacgagcagtacgcttaggcatagactgggaaaatacccgaagcttacgccaaagcttaccagatactcgaaaattacgcgaacaattcaggaaacgctgaaaatcacgcggattctccaattcggaattacacgggtgctggggtttagggtaactactgattggctgagccaaagtgtaattgctctaaaacaatgcgaaaaagtacaaaaacttcacaaattaacacttaaacaacgctacttagcgctaattcaagcgttggcgcttggacttggaaatggctgttttctggctgacaccctgaataagtagctcttcctcttgagcttcttcaagtgctctttgacgcgagctctccttaagttcacggtcgaacacagtaatgagcgtatacgcactacttgtaaacttaggatgtggcaagcttctcgataaagtatacgctctgattcggagcgaaaactcccctcctgagcctgcaggtggtgagtcaagcttgcaaggcggtttactgcgagtaaccctttaaacgaagtcgatctactgcttgtagactaggttttgggtttggtttacctttttggttgttcaccttggtcattcaaggccaagtgaaacaaaggtttccgcaatatactaggctttcgtgcgtgaaggtgtctagtgaagtgaacagcgttaaactagtacactccttcggataactaaccgttagcgaaaagcgtaaggctagtttagcaaaaatcgactagcgaaaagcgttgatgtcgactatgcaagacttttacggctagcgaaaagcgttaatgccgctaagtcagagtgcacgtagagaagcagttaaagcgaaaaacgataaccctaacccggaggttgtagcagtagtcgaactgaagccgaagtagcgaggcgagtcggttggagctcttctgaccacttgcccggcgaaaattgaccgacttgtgctaccagatgtgaggcttgagcagtaggagacgcagaggccgcgaggaagtgttgaccgcgatgccgaaagcgttgaggtggttggatgcaaatcacacgaggcggtccccagaaaattgccgacaatgtgccgtcacctctgtgacctggagtttgtatcggatgctgattggtggatgacttggatacggcgcggctgtacccgtgtgacatggatggcgactgtgggagagaagtgatttctcgggatgaatccagcgtctgaccgcaggtgggcccaactggctggaagtgtgaatcctgggagtgcacgcccagaatttcagagaacactcagtccagccgcggactttcccttacgatgagtgcctaaagtctggcggaaagtgtctctggagaatgtatcccagagtacgcctcatcttgctgtggctcagagtgccccagaggatcaaattaccctgagaatcaacccactactaccatgatcaagcgcaggaggccgctaaacccactaaaagtgtggctttgaggagatacacacgagtctacactgcagcagacttgttacccagagtgccgcacggaaacctagagtgccgcacgatgacccagagttcatctccctgagtgcaggtgacccagagttccaaaaatgattctctgggtttggaccataaatccagactctctatactgaacttaagtgtttcccgagccaacacccaagaatccccacagttccccaagattcctcagaattcccaggatttcagaagatgaccctgagtgtcatctggttttcagggattcgagtcagttcgaagtcagtctgcaatcaaagtgatgcgtgaccttgaagaaccgttgtggatgcgcagactggatactttcgaggagtcgagagggagtcctgcaccatactaaaccaagtctaaggacccacaattggcacttccgacgccgtgcgacaatggattcgcaagccgatcgcaagtttggaccgctgaacccaaggtatactcaagacaagacatttgaccccaaacatagtaaacagaagatatttgcccgaagaagagagagagaaagagagagaagtagctgataaaaaccaaacagagttccttttaccctgtactgcgcaagtgacttcggccaagcctgccgacggaaatccggaggacccgagactacgaccgcgggacgctaagggcacatcaacggcgaaggacagccgtctgtgtgggctccatcaaactcaagtccagttaggtggtgaccagcgacggccttgagcttcctggggtgatccatctattccatatcctagttgggtcacttgctgtgctcgtggtagcccatttcatattattccagagggtattctggggtgctaggtagtgtgtgaagggaaggtaactgatagtgattgtattttcctcctttattggaggtggtgcgcgtttgtgtgagtctcaggggagctagacccctgaatttcagactcgagtgagcctagtgtgtatgtgacccaccgtccaagggtccaaaagaataagtgacggctagttgaagtgtttgtatactctgtatttgttggttttatcgagctaggagggcatttggctaaggtgtcttctgagttccatgtcccagaggtgactgaaatcctggaccctgaattcgtgatattctgggtttcgggggatctgattctctgggtttgccttttggtgtggaggtgcgttctgaagtagacgtgcgctcccgcacttcttcgaggctacattttcaaccggtggagtgccgttccgtcgaagacaaacgagccgacagggattacacaaggtacccacgccaaccaaggagtgtgattctcagggtttaaagctttgcggctgcgaatctctgggtctatcttcttgctgttgacgctcaagtcgattctctgggtctacccctggggaacagtattgggctgcgctatacgaacccccctgggcgacaaaggtatcctcggcctcgcctcagctggtgcgcgtgcccggattcgattgtcgaggatttcaccggaatcaagtgttgaagaagtgttgagtgcccgtcaacttcaagctaccaagatgcctggagaacgaggggcgaagaagagtggacgcggtgacggaggacgcgatgaggcgtcacgtcagttgcgtcgtgttcaaggtatggagcctgaggagcacaaggacctggaaacagtcgtccgcgacgctcggaaggtgaagaaggctgctcgcgagagcgaggcagtgcaaggtggggacgtcgaggcgtctgcagtccaaggtcagcttgctgctggatcgcaaactcaggaggaagaagtttcccctgggttccaaggttcgacggaggtgaattctgggtcgcggattcctgaagtcccagaagaccacacacacgagggtggtgctcaggcgtctgagggaggcgccaatgcggttgagcccccggaggtgattgacttggtctcatcttcggacgagtctgttgtggaagtgaagtcggagcacgtgcgagcgaaggagaaggcgaagactcagagttccaaggtggattctgggttcgcaccacctgaacccagagtttcagcgccaagttcgcaaggggcacccaggaagacgcctgaaagcggcacccaggaagacgcctgaaagcgacatccgggaagctgctgcgcctgctccggaatcgggagcagcgacgttggacgccgggagtatggtgctgtacgttcgacgtgaagttcgacgctgggaagaggtgaatcctgggaaggtgacgccgccaagtgtcgtttatgagtggccgactccgaaaccggatgccaactcgtacttcgcggccgcgtacgcaacgggacatggcgtttgtctctggaggatcaagatgaagcctggatctctgagtttcacctcgcccggtggggcgtcggaactgctcaggatctcatggcgactacgattccccagagtatcatgaccacccgcgagtgcgtcgccattctgcagactctgtttttcgaagccggatttgagtttgccaatttgatccctagctggtcttcgacgcgtgcttccaggattccagaaagtctggtgcgctctgtcatggaggaaacccagaatttcatcgccgtggaactggtcgagtggagattggtgatagctggtgtgcctttcaaagtaaactctgaagatcacgccgcaccaagcgcccaagagcaagcaccaagactggactaccacaaggaagatggagacggtgatctattgatgacggactacgatgcggatcaactgggccgacagtttgtcctgagattcagagtcactggactcaggatttcacgagcccacgagggccgagtgatggtgagccacgatccaagcgtactcagcatggaccgcctcggccacaagttccgtcaacgccatccgcgctgtctacaccgtcgctgtcccctctttcagcgtacaagtcttcgactggtccctcgcttcagaattccactcccctgaattccatgtccaatggacgtgattctctggaggcggaagtcaaggacgctaccccaggcgcggtgccaagtgtcatcggtacctcgcgcgcttcggatgagagtactgcctcgggcgttcaaacgttttatggtagctcttcgtcttcgtcgttgatgtcgcttggccatcgagttggagctctagcgcttgtggcccagagtaccggtggctttgcagctgccggtgatcttggatttcaggtcaccctgacagtcatcccgtcgcgtattgtgtcagtcgaccaagatgacgttgagatggcatcgtcggtgcactccgacgcagagatcgcacccaggaaggccggtctccccaggatttcagccacgacttccgagccgaaactcagtgtttctgcccgattgctggatttggtggtccaagggatgtcagcgccgatgagcggagtcaacaccagagctctaagagcgaggtgcgctctcgacgcttgacgaaatccagaaaatcatctgcgtccagccgctcgagtggatccaggaatcttgggtcagttccgtgtccgcgaggtctgggcccgaccaaatcgagctgaacgtcttgcgacaacagcaggagtggcaggcccgcatggaacaggagcaacgcgagtttctcgccagagaacgcctggatgccttggagcgcgagcgcctcagggaacacgtgacctggacacgcgtcgccagatccaggaacttacggatcgcttggtccacgctgagatcgcccgaggagaagcggaacggcgtgcgcaggacttggaggctcgccagacccagagttccactgaaactcaggggatgacccagagtatcacggaagctagcgtgagcgcctggatgccgcctacgccaagcgctggcaacagcacgaagccgaagccgactcggagcgcgcgcgctgggtttccgagacgtacgccggttggaaggaacaaatgtcaactatggatcagaaggtccaagaacttgaggcggagaaagagcgagagcgggagtcttccgagaatatccagcgtttccacgccggccaagtgcgcgaccttcgtgcaacattggcccaagttcaagcgcgtcgcgcaaccgtcgcccctgatttggcaacaaatgtgaggtcgtcagtggctcagaaccctgaagttgcaacccgacccaagaatccagtggcgtaatcaacggaaacgcatgtgtcacaggccagagacgggagacagctgattcgaagaacacttccgaagtcaccgcctcccagctaagagcgaccctcgcgcagacttccgccgacacttccggcagaatcgcgcgcgtcaagcggggacatggcgctacggagaccaaggtgacgcaggatgtcaagttcgagcctgtgtctctggggaagacgtcggatcccaggagaacagcgacctctaaggcctcgcaggactctaaaacagactccaagcgctctgcacccaagaaacaccagcagaagaagaagaagcgtcaggatgtcaatccaccctcggactcagacccaagctccgattccagcaatgatgactcgtcctctgagagttcgaatgacagttcggacgggaaccctggggttaacctgacgacggcctctacggctcaagctggtactacgctcctgacgttcaggccgtacatcaactcgaatactctgggtgagttcgatactaaggcgtcactcagggaacgcgtgcattggtgggagcgttttgcgaacatgacggctcagggaggttggtctacgaatatgcgaattcaggaactcaagttgaaactctcgggagctgcgcgtgactggttcaaccagttgcccaaacacactcagcgtgactggaaggagttggcgtctacattcaggaagaagtaatggaaagcgcgctcgtcgtactctgaacgttacttcacgatggagatgaagaactcagagagcgccctggatttcttttatcgtctgaattccgccgctggcaaggctgacattgactttcgcaagtcttcgaagcgcctggagaaacatatccggaggttcatcacgaaactcagggacacgcgcctcaagacgtcgctgcagggccagagattcaggagtatcgctatctagagtacgctctggaacaggacgaagatgtctggagccgcagcgaccatgatgctccgccacccagagttcgtgactttcgtgccgacaacattcctcagggacgtttcaagccgaagcgacaaggacgtgcgtatgtgactaggggcgatgtctctgactctgagtcagacgaagaccctgaaattcacgcgcgtttccaggaaatcacggacgaacccagagtttcagcccgaagtgtgagcgcgaattcagggtcaactcgtgagatctctggagaagaagcttctacgcctagcgctgggagtctggcgagtatgatgggtgccgagtggactcagacgctgacgaacgaggtctatcgcgtgatggataacatgggatggcgtccaccgaacgcccaaccaggaccgaacgcgaactctggattccgttcccctcgccgcgaaaacccgaattgggacaagttctgcgagaagtgcggcaagtgggggcacccagaggaaaactgctggaaagaagtgaagtgtgatcgctgcctggaagtgggtcatccgactcacttgtgtcgcgcgcaaccgtgcgagaactgtggcaaacggcatctcgggaaaccgtgtgaagactggaagacactggaagctgtgaagaaactcgcccgccaaggtgcactgaaggacatgccgagccaaatcctggataaactcctggatggcgaagcaaactctgggaggccgtcaaaccaataagcccgctgggtggggacccagtacgcgccgggctgaagaaggccccagagttatgtgttctagtgtatgtaggcccggagctgagaacaagaacccaagataaccaacaatgcatgactactttgactcaggatttcatgacttcccctgaaaatcagcatcctgaacaagcgaactctgggtcggtgaattctgaagaattgtggagtacaagctgaaccctggagagcgctacggatggtgggaaaacaatgatcctgacccaaagaaacgtgatgtggcgatggtgcatggcgctgtgaacgactgccggacgagagttctcctggataccggtgcgactgtgaatattgtgagcttcgacttagcgcgtaagctcggactcacactcaagtcgcacaagcaaaccaaggtgtctggcatgggaggcgttccgacgtacatcggtgccagtgctcaggtgaagattactctcggttcgagggtgatatatctcctggatatctggattgctaacatcggcgaagggatcgaagttcttctgggtatgagtttcatgtttgcagctagagtgaggatcagtgttcgcgaaggtctcgtgacacttccggatgaagaggcgatcatgatgtgtggatggactccataggatcgcctgggtgtcgacatgcctgtggaaaccacaggtagttggtacctggcccctggggaatccaaggtggtgaagatctcgtatggaccgacgaacccacagcgtgaggttgtgtgggcaggacgaggtgaccgctgggtaacgcacctgatttacgctgcgagatcctggccggtcgccgtgaaggtggtcaacatctcggacaaggacgtctggattcacaacagaacgccagtcgcccgaattgtggagtacggcttcttcccacgtgctggacgctttgtgggccctggttcgtttgcgtatcgggagtggcagacgcttattctggagagtgttcagtcgcgtgagggcagacttcgggcggaacgcctggctgcgcttgagccatcctgtgtcgagaccccagagtatcagtggcctacgaagattctgccgcgacctgcaaagggccccgacatggcactgcttgcctcgattctcaggaaaccgaagcctcgtcgcgtgcgcttcgctgaagacgctgcaactcagactgaaggagtgcctcctgaagaccctcctgaactccgagacgttgctgttgatacgagtgacttgggtgacgttctgaaggaggcggtgaccgatgttgcctcgcagactgtcggaaccccagagggcatgagtcctgaaggtgatacggccgctgaaaccctgagtttacaggttgaagttggcagtgattatcagggtcagtggtgcgacgaaggtgattctctgggattcgatgtggatgacgacgattctcagggtgctgttgaagattactgggatcccgatctcagggacgccgggaactccgttggagaagctgaagcaggaatatgagcgctgcatgcggctttcgacagaggacctcggctacgagcctgcggtctacatacgtgaaggaagtgagttgctctcttagttgcgtgaccagttggttatgcttcctgagatgcgtgacttgacccctgagggcaagatcgaggaggcagatgttggagtccctgggaaaacgacgcccgagatggaagaccaagtgaggcaattctggaatatcatcggaagatcttcttgggagacggcaatgcagctcccccgcctgcccgtggagtggtttgtgacctggatgtaggcgacgctaaacctgttgcccagcgtccaaggtccattgcaccacacctgtggactaaggtgtatgaacttctgaagaagcttctggagaacgggctgatcgagacttctacgtccccctgggcatctccaatcgtgatcgtcctcaagaagaatggcgtcgacatccggatgtgcatcgactatcgcgtggtgaatggctttatcaagctctcacactatccgctgccgcttattgatgatcttttgattggttttgagtcggcgatgtggtttatgagcttggacatggcgagtggtttctgggctatcaagatgaccgagagagccaagttgatctctgcgttcgtctgtccctctgggcactaccagcgggtcagaatgccgtttggcctcaagaacgcgccgctgatctaccaggcagttctcaataactgtctgtggggatttctgcggctttcccctgaggaagaagctgaggtcgaccaagatgtcttggaatttttggggttgaactctggggaacccagagtttcaggtgaaaatgcaccgcgactttcagtgttgacggatgagatgactgtttttcagcgtaacatcccggctccctctcagatgggccctgtcctgggtcgaagctcgtatatcgacgacatcgcccacggtgcgcctacgtgggagcagctgtgccaggatctgaacgcgctgctcttccgactacgtttctggaatatctctgtgagtcttcccaagagcgaattcgggaagttgtccattccgtacctctctcacgagattagtactgagggcatccgagcgacccctaaaatcgcgaagggggtccaagacttgccgttcccgacgacactgaaaggcgtccagagtttcatggggagtctgaattactacaacaagttcattgaagatctgcccgtgatcgcggccgtcctgtacgagctgactgaggaacaagtgaaatccaggagagacctgtcgagagcccaggaagcctttgaaatcctgaagcacaagattgtttcgactccgttactcagacatcctgatcgttcaaggcccttcgtgattattccccacgcgaacccgtgggcagcatccgctgtgttgggtcaggagtacgacgggattgtgcacccggttcgattcacaggtcgcgtcctgaatgacgctgagctgcggtatcacattgcggaaaaggaggtgattgctatcctgagagtcatggaggtgtttcgcactttggttgaagcattacgctcacgaagattttcagggtgggcaccaggggatcacgaggacgtacgagaagctgcgctctgagttctactggcacgacatgtacgctgatgttgaagttttcgtcaaagagtgtgtggattgcgccagcggcaaggggcgccctcagaatccagggccttcccctgggaacatcgaaccgaggcgcccttttgaagttgtgtctatggatttcgcgacacacttgcctaagtcggaccgtgggaacacgttcctgctgctttttcaggatgcgttctcaggattcgtcatgtgtaaacccatgagttccaccacggcgcaagatgtcgctgaagtgtacgaagagcaggtcttcaggagattcggtgcgagctcgatgctgaggcacgaccaagacccaaggttcatgactgaggtgttcacgcgcttccgtgaacttttgggtagcaagcagcgagccactctggcgtatcgcccccaggcgaacggacaacaggagcggtcggtgcagactgtcgtgcgcagcattcgagcgtacattgctgaggcggaccagagtgactgggacgaccatgctgagcgcctgatgtttgccctgaatacatcgttcgatgccactcgcctgggcactccgttttatctggtgcacggctgggacacacacggcacggtgtctgcaatgttaggacccaggccctcgagtatccaggagcgcactgcgtacgagtggcgcaggaagctacagcgtgactatagttatgcacaagcttgcgcagaggatcttcagaagaaggccaagcgcgcgcgctctgccgaacaaaccaggaagtggagagagctgtccgaacgactgatggcaggattcgcagccggtgatgctgtgtggctgtatatacccaaagtgcagcccaggctgagccgcaaactggctcacatgtggcatggccccttcagaattcaggaaatccatgacaacttccgcgtgaaactcagggtcgagaacacaggatatcgcgtgaatccctgggtacacgtgagccgtttgaaacccagagcactattcccgaagcggcccactgtggagatcgacgtggacgaggatgatgactttgatgcggcgctgttgcctgaagacagttgggagcccgacgctgcgaacgatgagtacgaagttgagcgaatcctggatttgcgatggattaagcgggctcggacagcgagacgaattcgtgagtaccttgtgaagtggaaggggtatgatgagaccgagtggctgcctgtgtcgaagctcaactgtggtgccctgctctacgaattcaatcaaggcgcaagagcgcgggcccgtttccaggccatgcaggctggagatgatcacccaggagtctagcactatggggtggcaatgacccagagttacacgtgatattcaggggaaactctgggtgacactgtgaaactctggggaaaatcgacagaatgtgtgaatattggagacggaaaacgtgaatgtgatttgacttgatttgattatggagaaggtgatgctgctgaggcgttggcagtgtgtgagaaggaaggtgaaggcgaacgacgtggacataggacaccgatcccagcgtcggcgccacagacttccttcaacccctgaagatcctcgtcggagagctcctcaaagccgaccaacgtggtcgcgccgccgtagccttccatggcgaacgcgcccgcgcgaatgtcgttcacgatccctgggatccccacgagatacgcgttggtcttgagattcggcggagccggcagtttccagtgcgggggggcgttcaggggccaggaattcagggggatcgacctcctcctgccgaagcatgcctgcgaaaatgagtcccctgacttcctctagcgtcgcgtgtcgtggtaacttgaactcaggggcgccctccatgtccacgtccggagccacgccgcctgcgtctggagcattggactctgagttcgcgtcaccagtttcctgggttgcagcgtcagtcgaggcgttgccatcggcctcgcgcatgtccgcgtcggaggtcttgccggtggcgctggagaaggagacgcgcttggtcacgcccgtctttgtgctgcccgtcgaagtgtcgccggacgctgagttacccgcctggccgctgccgccgcctgctggtgcggtgctcgcaggggcgtcgccggtgcgctgctgtgtcggaggtggcgcgctgccggggggcaccgtgccttgagctggcgccgtcgcttgcttgccgtccgaagtcgcgctctccgccatgttgacgatctgcgaaatggcgatgtggccgcgcattgcccgttggagtttttgcgtttgagaggagaaccttgaagataggtcctgaccaaccgttggggagacagggtgccgccaaagtgagtgaaaccctgggagtcgacagagtgcaacggccgtatcgaagtcgacggtggatggacctgtgtgtttttgtggcctggccatggttcaccagttcggagcgatttcctctttgatggaccgtgaaagttaatttaaatcgttaaggccctgtggccgaccgtctgggcagtgcccaaggcggtgctagagtaaatcaacctgattggtcaatccacttcaagttgaagtgaattgacgtgcgtcatacaaacgtcaatgtagttgatagagataatgcaccatgtgcatgttttttccttgtcatgagtgaagttttttccttgtcatgagtgaaggtgcctaagctagactaatgcttacgccctagccttgcacttgaacggggcgggccgacgacgtgctcgtcacgtctcgatcattacagtatcagcagtaaccttcgaccaggcgtcctcacaccacatcaaagcggtaagaacgtcaaccttataaggctcatctactccttctcctatttggtcgagcgcatacaacattttctccaataatacatacctcttgatacagtggataataccttggttggtaggtcgaggctttgctcgcaaatgaggaagtgaacgcttttaaaggaaatcaaagtggcgaaagcgcgccaatattcaaattactgctgaatacgacgtcacgagattaattgatttttagctcagtacctttgctcatcaccatctcgtcacctcgtaagcccagaattataaattatacaagggtattagctgtagacccgtccggtattcacgcacattactgtataggtttgtgtgatacacatgagatgctgtgccacattaaattcgatttacatatatgggtttgtggacataaccctagatcatgtggcatacaccagtctcgaatttgacacgcaatcatttcggcgatttctccaagagcatagatgagcgtgaggtggtcaatgtcagttggcaaattgaccgcgggtccgcaacccacctacccatgtcggtcaccacagaaatcccaagcgctccgaccaccgccttggccgtgacgctctgcgtgctggcactcacgcccaagatcatgtcggtacttgccagtgcgcacttcaagctcaccgcggagcgaccaaagctcgtgttcaagtctacgcccaagaacgagcggttgctggccaactgcgtgcacctcgtcaagaagaagttctacccgctgtggtatctgttcaacggccacttgcagacgctgcagttgtcctgggcaaatgagatggagcccacgcccgccatcgcctacgagcgccagttgctggatatgcccgacggcggagtagtgtccttggattgggcgctattgccgtcgactaccacgaaggataccaaggaatcgctggaggagcgcgttgacagcaacaagaagaccgtgctgattctaccaggtctgacgggtggcagcggcgaacattacattcgcagcgccgtcgagcgactgaacgccttgggctggcagtgcgtggtgttaaactcgcgaggatgccagaacactccgctccggaccccgcgtttgttctgcatcgcgtatacggacgacttgcgctacgtggctcgatacctcgcggacaagtacaacttcgccgacgaggctttcgtcggactggggttctccatgggctcgaacgtgctggtgaagtatctgggcgaagacggggatcaggcgcgactgactgcagcgatctcagtcgggaacccgttcaacatgcccaagtgctcggagaacattgaggggccgctcttcaaccgcctgacgtacagccgcgtgctgagcgcaggactgcgcgacctcttctttaaccgcagcaacgcacatgaggtgttccgcgactatccgggcatcgatgtggaggcgctcaagaaggtcacgaaggtgtcggagtttgacgagctgttcacgatcaagcacttcaactataagagcgtggacgagttctaccaggacgggtcgtgcgtcacgcggctgcccaaggtcacggtgcctctgctgtgccttaatgccgaggatgatcccatcagcgtggccacctcgctgccaacgaaggaggaggtcgaggctaacgagaacattatcctttgcacgaccaagagcggcggtcacctcgcattctacgagggaaactacgacgaaggcgaagaggagaacgttaaggcccaggaaaccaagcccaagctgcgcccatggtccgtcaaagtcatcggtgagtttgcggagagcgttctccagtgcaagcaggtggagaaagccctatcgtaagtatttggagcttatagagtgcttcgaggcgcaccgtttcaaatctagtttatattgacctactacacggtcgagatgatggagggcaaggtacacggtcactatagcattgattgatgaggcttccagtgggggactcacgtgaagttttacgtgtgcaatgcatagatccagtggctccgtgacttgggtctcagtcacgacaagatcaacgtcgtcattaagcgccactccaataggtaaacattgacagctcgttcgaattggttacatcgattgcgttcagtttaaatgcaagttttcttcacacggttacggtatcacgccagtgactttcgtcgaaaaactcagggcatctccccgctacgataccataaactctcgatcaaaagccgacgtaccgatctgaataaatatgctttgacacaatagcctaagaataactagctataaagactcatgatatctagatacgcaaaaagggacttgctcaagtgaaacgcagttcgtgtgtaaacggcatgaagttggagcaaacctgcttcgatcggggaaattagtgttttgacggtatggtccaggttggaaacaagtctgcttcgatcggggaggttcgtgcgcaggtttggcaaagtcgccgaatcggcagagcgtcgacaatgaagtcaagtggtagtgattgatgcgcttcttgtcggcgcgcgtcaatcgctgccgagcctgaaccacatccgatgcggtatcgccttcaggcagaacacagttgcgcgagtttgggcggcgattctggacaagcaaatcggaaagccataccaactgcgttagactcgaaacgtaaattgggaagtagtagttccaaccatttcgtggggttcacgatatctacctattgtagatggataatttcaagatatctagaactaattctatctagaatttcaataataataaaaaataaaataaacagactccaacacaaattgaattatttcaaccaaacgagttactatactacaactaccgaaccaagcttcggaaacaaattcacaatccggcgcaagacgaagaaaaaaaaatcacgaaaaaccagcttcaaaaagaagaaagcattgcgttccgagtgtaaattctacgccactgcgccaaagcagaaacttggtcgatccaatacaccaggtggcgcatgttgtcgcgagttggtgcagttcccctaccgaagatatctcaatgaaatcctcggctgcatgcagaacctccaccatgtactagccagctcgaggtttgtcgggttctttgctgccggttgaatcccattcttgcgagagatgtccgccatgttcattccgctccgtcgagcaagaaatgcgacttacttgcaagttaaaaaaggaaatataaaagtagcaatatagctatgcaataaatgtagctgtattattgtttatttgaaaattatggatatatcatccacatcttctttgtgcgacgcgcggccttgcatcaaggcaaagcgccaatttaggagagagtgctcagtttaagagagaccttttcagccagtaatagtgcagtattctttaatcaaagcgctatgattggtcaataaccttttatgaacagagacgccagcatttgcatacaaacttcaagcttaaatctctcttaaactggagcacctgctatccgagacgtcttcataacttgcttggttttgtgttgccttcacaacgtttttgatcagttgtagattcataaatagtcgaaaccgtcctctttctgctggtgccaaaaccatcgttatgcgccaaaaaatgacgccggggcgacaaaacaaaattgacactccgaaatctctcttaagctggcgctttgccttacgagcaggtaagaaaaagtaggcaatttaagcggttttcatttaacgtataataccgaatagtatgtcctaaggtattagagtcccctgcgaatagagcgccctatggtgagggcatactataacaatagagtgccatcaaatagagtgccatttattagagcgccgttccgaataggctgccgtcgaactgacagactgtacatacacgttgatattatacatgttgaatgcgttgggtagctacttaccgcgctcaactgcgatgccattccggcattgatcgcgctgcaagacgacatcgtgccagttttgctttttcaggagcacagacaatcaaccatacgactcgacatcaaaatgcaatcttttgagtggattgccagcgcaaaactggttaataatcggaagtgtagagtagtaggagaacctgcaccccgattgcatgaccgaattcgatgggtttgcgtttcggccctcctcaagaatagtatgccgcatactaatggtattatacgttatagatttttaaatgcctggtccttttcgctatgtgctccacacaacagtagtgtgcgccacaagaacaactccaagttgaagtttgggtcatcagatcttcgcagctcactcactcactcacttgctaatccaccaccaagaagccgtcaaagcctacacccctacacccccacacgcccgatgtccgcgtcccccaccaagaagcagaaggtggccggccccttgacggcgcacaacctgatcgacggcgcgttcgtgccgccctcggggggcgactacctcaacgtcatcagccccagcagcagccaagtgatcggcaagtgcgcgctgtccacggccgcggacgtgcagctggcggtggccaagggccaagaggccttcaagcagtggcgccagacgaccgtcaaggcgcgcgcggccatcatgctcaagttccacgcgctcatggtgcagcaccaaggtgggagatagttagagggccctgagaacaaattagaggggtgtttcattaacattggggtgtatttggggggtggcagacgagctggcggacattgtggtgcaggagaacggcaagaaccgcacggaggcgctcgccagcgtgctcaagggcaacgagacggtggagtacgcctgcagtctgccgcagctggtgcagggccgcacgctgcaggtgtcgcgcggcatctcgtgccaagaggtgcgcgatccgctgggcgtcgtggcctgcgtcgtgcccttcaacttccccattatggtgccgatgtggacggtccccatcgcgttgaccatgggcaactgcgtcatcctgaagccgtcggagaaggtgggcgctgagatctttgtgttgttattttaatatgagacggttgagctgattcttgcgttaatcgtaggttcctctgactatggcgcgcgtggcggagctgctgctggaagctggtgtccccaagggcgtcttccaggtgagtttagttgtgtgtgtccaatgctggaactattgctgatggtttggatggttgtgactatggttttagatcatcaacggaacggtggaccctgtcaacagcttgtgcgaccaccctggcgttgccgctgtcacgttcgttggctcgagtcgcgtggcgcagctcgttgctcgtcgatgccgcgctctggacaagcgtgtgctcgctctgggtggcgcaaagaaccacttggtggctcttccggacgcagatattgatgtcgcctccaaggatattgttgcgtcgtacgctggttgtgcgggacagcgctgcatggctgcttctgtgcttttgctcgtgggggattgcaatgcgctgctcgacatgatcgttgagaagtcgaaggagctggctcgcggaactgaggctgggcaggttggtgcgcttattgatggaggctcgaagacgcgcgtgctcaagtacatcaacgaggccgaggctgctggtgccaaagttctggtggatggtcggtcgtgggccgaggagacgaacggattctgggtgggacctacggtgctgctccacgcaagcccgaacgacgctgccatgaaggacgagatcttcggtcctgtgctttcggtgtatcgtgtgagctctttcgacgaggctcttcagatcgaaaacggaaacgactacggcaatgcagccgcgatctacacgtcgaacggggcctatgctgaatatttccagtcgcgcttccgcgccggcatgattggggtcaacatcggcattcccgtgccacgtgagccgttcagcttcggcggtatgtacggcaccaagagcaaatacggcgacatggacatcacgggcgatggctgcgttgagtttttctccacgcgccgcaagatcacgaccaaatggagcacggtgatccactcgggcgacgcggccaacttcagtggccagatgtgagcaattgagagctcttacgacgaacgatttttcttgtgcaagatgagtttggccaagtgtacaaccccgcttgatcgagccacagaaagaaaaagcttacagattccagttcttcgtcggtatgagtgttttgttaagcacaacacctattcgtaaagttattggacttggaacaagccgacaacttggtactcaactcatgcacggcattcaaattctgagcaacacctccgtcgtcacaatgaacaacttaagtccttgctgtcagtttagtcgcgtacaggacaagaaggggctgtgcggttggaatggggtcggaaagcgtgtgtagtacaacttgcgcgcgttatgagcgtcctgctacgcgtcaacgctgtcggccgcgttggtgggggcaaagcacagcgtgacagcgatcgcggcgatgagaagcgtcttggcgaactgcatcttgaagcgtggtctctcttgcgtgggtcgtagcgaattggaaagtgacggtgagaacaccgtctaaagtttgcgtcaaacgataatcgtagcagcttctggctcgcttacacgtacttgccgtagggtgcgatttgacagacggcaggcatcaaagtttgcgttagatctgcggggtgcccgcgaagcagggccgcgcggtattgcggaggtgggcccagcgacgagcattccagcgaacggacccgttgccgcaactcggagttagttttctttttgcgggggtctggggcagaacaccttttagcacatcagatccaatctcagatctgtaccgtatatgaccccaactggaggttaccgtgctcgcgatatccctgcagcggcaacattcgcgagataaaagagattgtatatgctttttcggccctccatttttctagtgacgtgaattactatgaaacacgtacttattaataaaaaacagtattactaagttttttttacacgacgactacatcaacagagggctagtacgacttcgcgcgttctgggatcggaagtcccctaccagctttccgaagattgagctcagacattcgttcaaactcgctgccaccgttatcttgatcgaaagccaactcctcgcgggcgatcgccactgtgtcgctccctaatatgtcctcaacgcacccgccacaaaacggacgcttcttctcgagaacggtgcggccgtcagacgccataacataaacgatcttctttacagtacatcgggtgcacatgagttgcatgcagctctggcaggtttcgcggcttgtaccaagaaacccgaagctgttgaggcacaaagtgcaagcccctggacgaatagatgacgatggagacgctttggcattaggaggcaacccaaagctggagcttgagcatgtacttgagctggagctactcgcgtcggagcttctaccgtcgagactgtttctgcgcagcttccagacgagtttcttcatgcgtgcacactccactttgcgtccaaacgacagccactgcgacgccagtgcctgcagagatacattattcagcatctcgttcttggtcgggaagtcgaaaaaccctcgcacgtagcactcgacagtcgtcggcgtcttctgtttatacagcgagcacaccgacatgttgcctcgcaagacaccttggctcttgaactgtgggagttccgagaacgcgactgagtgagcgaagttgtatccaacgcgctcgcccttgctcgagtgcacgactccggtcgcatccagcgagatgtagtcgcgtccgtggtagagcttccacttgatgccgacgtggtggaacggatcctccactgaggcctcttccagctggcacagcatcttggtatccagcatcccgtcattgacacatctcgacttgatcttcagcgcagcgtccgtgggtgccacaacgccgtacatgacgtcctcgacggtcccgtccaccgttccgaacagcaacaatgacggcgtgaatggtgcttcgccacgcccagagcccgggcgttcacggtagatcctgagtccatctttgcgccgcatctccttccactgccccgtggccgagtccgggtacccgttcttggtgactagcagggtgttgcactgctccaggttgtgcgcgaccagagtgctggccagatctcgtagcatgactcgatctgcatcggagaccgacagctccggtagcagatccaccagcctgctcttcattcttttggagcagaaaacacagcggagactgtcgtgtccgtgagcagaagtcaaagtgagccatcttccaagtcgggcattccgcggagctgaaccgatgtcggagagagcgagccgaggctttcggaggtgcgagatgagcgccgcaacttgccgctgcagcatatacgcgtcatgcttggcgcaggccaatgcgcacgaagagacgcgagtgggatgcgccatcgcctgtcggccccacgttgaagtgtaggcgcatagccgcgcggcgctgatgtgtgattggcccatcccatcgtgaaaaatcgatgattgggtgggcgaaaaatacttgaaaagtcgctgaaggagatggctacaactttttgagaatggatactcttacatgttcattcatacatgaggagtctccgaatggactctatcatagcgagatctcgacggggtcgctgtcgcggcgcatgttgacgagctcgtcccgtgcgatcgcgacggcgtcgctctgcacgacctcgtggatgcatctgaagcaaaaggtgcgcttcttctcgaggatggagcagtgatcgggccccatgacgcacacgagcttcttgacgcagcagcgcgagcacacgctgtggtcgcagctcttgcaggtcttcctccggcccgggatgaagctgaagctcttggcgcacacgcggcacgtggcgtcggtggacttgtgctttggccgctcggccgcgagctggatcaggtccgagtcgtcgctgtgcttgcgcagccgccacgccagcttcttcatctgcgcgcactccatgttgcgcgagaacgacagccactgagtggcgatcgtctgcagggcgaggatggcgttgctgtgggtgccgctcgacaggtcgaagaacccgcgcgtgtagcactcgactgtgtggttggccttctgtcggtagagtgagcacacggacatgtttccccgtgcaatgccgaggtcggtgaacgctggtagttgcgggaaacccacggagtgcgagacgttgtagccgacgcgttctccccaaggagttcggatgatcccggtcgtgtccagcgtcacgtagtcgcggtcttcgtagagtctccactggaggctcacgtggtggaacgggtcgtcaaccgtaggagataccagctcctccagcactttgctgtcgacgacgccgtctcgaatacaggaggatttaatcttcagcgactcgtccgtcggcgccagaacgccgtacatgatgtcgtccaacttgccgactaccgagcccaatagcaagagtgacgggatggctggtggtgtatcggtcgccgaacgggggcgctcgcggtagatgcggatgccctcgaccttgcgggtggggacccagagccgactgtccgggtgaccgtccttgctgacgcagaggttgttgtactggtcgaggttgtgcgtgacgagggtcgtcgccagctcttggagcagcctctggtccgactcggggatcagcagaaccggcaggaacttggagatggccacgggcttcggcatcgtctcgggtctcgggttgttggtggcaagtctagcaatggccttttcagaggcacgcggggatccggacaggagcctcgtgctccgactcgaagacggtaagcactccactcgtggataagcctgcgcctcaccaaattttctgaggttctgcacgctacgctagtacgccgctccgtaagcagtggcggatccagcggagacctggccactgacttgaccgatcttggcgttaagcgtgtcaacttctagtcacctcggaatgaatggaacgcaacaaaaaggtttttgacgggcattcatattcggaaatgctaaacgcacgggcgttcaactcataagatgctacggagaaaatgtaggaactgcaaaacaaccgagaggctgctcgtccacaatggcgagcagcgcacgaacctgaggcggacagagccgctccttgcaaaaaagaaatgaaagtgtagagtgcgacacacgctgtcggggatgacccatatcctgcagacgtcgcttagcttgtgcgcacgcgcgcggcgtcggccatgctcttccagttggtctcgcagatcttgatgaaggacaccacgcagccgaagaagatgccggccgtgagaccgagccacatcccctcgacgcccagctccatgcggaaggctaagtacacgccgaagggcaagccaatcacgaaatacgcaaacaggttgatgtatgcgcccagcacgaggcgtcctgtaccgcggaagacgccttgcatgacggcgttgatggcgtctaacatctggtatggcatgaggaacagcagtgcatgacccgccagtccgatggacatggcgtcgttgatgaagatttccgggatgaagtagcgcgtggcgatgatgatcacagcgatgacggccgagagagacacagacagcaacatgcccagcgtcgaggccagcttggcgtggtggggcttgttgctgcccaagtagttgccaacgagcacgttggcggccaccgagatgcccaggaagaagttgaacgcgaatgttgacacattcacaagcaccgagtggacgctgatagcgacgacgctgttgggcagccagccgacgatagccgccatgatctcgaacgaaatccattcgagctccatcatgagcattcccggcacgccaagaatcagaaacttgcccaggtgatctactgcttccttcggctgccagcccggccaccactcggctgggatatgcgggttgctcaggtagaacgggaccaaacacaacggaagcgcaagctcggacaacaatcgcgcaatcgccgcaccatcgaagcccagcggcgtgtagaacgtcaggaagacgcccagcccaaggttcaccaagttgctgatcaccgcaatgtacaccatcggcagcaccacattctgggcttgcattaccttcttcaacagctcgtagacgtacatggctgggacaccaggcagcaggatctgactgaatcgacccgcaaactgcgccacttctgcgggctggccgagcatcagaagaaccgcctcagtgtaccagttgatgacgaagaccggaatcatcgccaggcccagcacgatcaagccactctgaaggtaaataccgagcttcttcggtttgccagctccatacgcctgcgagcacagcgtgtccatcgctgtcgccaagccgaagcccacaccgatggcactaaggttcaagaccatggtcgacagggccacaccgtccagatactccttcgtcataggggaatccaaatggcccacgagcgtcatgctgaccaattccgggaagaactccagcacatacgtgaaaataacggggtacgccagcgtgaagagcttgcggacttccgtcctgacctctgggtgagcgtcagtctcaggttcctcgagaataccggactcaatgtcggtctccgaatcccgcgcgtaggactgaagcagtgggaactcctccttgtccgtgtgcgacttcttcgccttgctggccgccttcttcaccagcacctgagactcccaccgatccgcggccgagaaagacgacgagcggatcggaacagccacggggctgtccgagctgtacgacgagctgaacgagctcgtggacgtctcggagtcatccccagactcctcagatatcttcgaggtcgccttggcacgcgctgcagcgctgcgacttggtccgttgaactgcttcttgatcctcgctccaccgcgcggactcagcaactggtgcgcgtccaagctccacttctcgacatttgacttccacgacgttgcgctagactcgtcactcggaggctccgacttggccgacttgagagtgccgtagccggagaactgtcgcgtcatcgcagcgctcttcttcttgagtggcttggcgtcctggttggtggtcagcggttggagcttgagcttccgggcggtcttgacctcgcctcgaggcttgggcttgccggccgcgtcggcggcctgttggctgtgccgacgcttggcttggtctctggtgcggcccgcagcggacggagtgggcgcctggccgccatggtttcgtattaagccgctattgccgctactactgccactactgccggaactgtcgctgtccccggcgctggagctgtcgtcctcgccgacattggccacgatcattcccatcgtcctcctggtctggggctgttgtgcctggctggtcgtcagttgggaactggggcttggggccgttgagcaattaaagattgaggcgtctcgcggtctgatgcgatggagagctgctgctgctgcttgaaacgcctaacaagtggggtatcgattgattcttggataagctgacgtcgcgatagtcacacacaaaacacagacacagcataaaagttagtttggcggcgatataatgcggattctggagtgaaaaactatggtaaaaacccgaagaggcgccccgtcgctatgaatagcaacacggtctccgctaaagccatacaaaaaccaagatcaacccgcagggtggcatctccgtggtatctgatatgatgaaatgtatcactcaaaagtacgtacacgacgtcgagggtggtccaggtaatgcagtcggcaaatttcgccatgcagcgggggtggcgaggctccctctgtgtttagtttcgagctcgcgttgcgtggggacccaagcaaggcgaggcgagcggtgtggtggttgcaaaaagtcctgcaacgggggagtcactccaaggcgttgggtgggtagctggactgggctgagtgcgttcgcgcgccgcttggggctggttactgaaggtgcggggtctttcgaggagacttgcgtgcgagagcggaggttcggaaatgatggacaagtcgcgcttggcacgccggcgattgcgtaaaaaactgtgtttttagtgggatcgcagaaacgaatagcaaatattgtaacggatttgacagagaatcagtgtaggcaaatacttttgtatgcgtttaccttctgaatgtaaatattatcgaatacgcggagattgttgtatgaggttgtaaagggtagaccaaatatcgggtattgcggacttaacgtgggtggagcagggggatgtgagcttgcatttcttccttccgccctctgcggacgaccacgacgtcatgaccgcgctggtctggcctggcctggccgcggtctatttcgaccccgcgcgaggtcagcgcgctgatgttacgattgcttgtgttacgccgctggagtctgcaaagcgcgtagcgcaagcaaagcacttcttgtcccgacgccagctggggtctcgacgcgcaaccatggcaccaggagctgcgagaccgtcgaggcatcgatcctgtaaatggcagcccagcggatactacatgtagagagagcgtaccgagcgcttcgatcggcgagcacttcacatgtcaaactgcgacacatgataagagaccctgcaaaactggctcatgcgctggtttttattcttgcatggcgcgcttcgatatgcatgttctcagcgttttttaatcgcttttggcttgcggtgcttgttcgaacgctgaattgcagttcacgcagggcggaccattgcgtgccgctcgagaccgaaggaaggcagacaggaagttgggcctcaacttgaggcagcttgcctcgacggaatctttgggagatctcggtgcacgccgcctggcgtgagggcaccggatgaccaggatcttcgcgttaaaaaaatgcgagcgagatgaatgcatgtgggccacatgaaggttatgtgcaccacgctacatacgttcagtcgaccaccgatatttatgtggtacacatggtattaggatcgaccacagatagatctctcctagaggctccaaagacatcgagaacgattacgagctgtaatctgtaattttgagaaaatatttgaaacttcagcaaacaagctgtaaatttaattttaatatcatggttcgaatccatttttgtataatccgctcaccataaatacaacacagccataactatttatatctgagtagaactacaccgttaatgctccgcttgtagtcacttttcattttgcaccatgccaccacacaaccagcgacgcaagcacacacggaactttcaacgcaaggccgatggatcattctggaagctcaagtccaacaaaaaaattccgacccgagagccgtccgaagagcggaacgacgctccggtcgaccgaggagtggggctcttcggcggatcccgagcccgacgaggtcgcgcagagcagacatttgaggtagaacggctatacgcaaaacgatgggtgcacagcctcgagttctacctcgttcagtgggtcggctaccgagagctgacatgggagccctcgaagaacataccctggagacttaaggtagacttcgaaatagaaacgataagctttgtttggttgtaccaaccaacacgaggtcgccgacgctccaccaagaatccaactcggcgcagctcgcgcatcctgcggggtgcctagcctaaccccgagatagctaagttcgcgtggcgaatttaatacatactgccatcagtaggttcaattgatccataagttggggacgattcagtacatacatactgtattatggaaattcctctagtgtagtgcttttgtgtaacttgatgttattgacgattcacgcgcggtctggatttgtgctcggagtccataaggccaacgagcatgctactggacatgtacagtagcaagagcacggtccaggtggcgtacagtggacgagcggtcaatgtacatggcatggttgctgtttggacctggatacatatgttagactaggtcgtcttcgacttggctgggagcacctgtggtataaaacgctggcgctggtaccggtgctgattgccgtgataaggaagaactgtggcccccgcaggggccacacccatgaatatcgcgcgtgccgcagttcactttctgaagctggtgcatgttgttgatgtcgctgtgcatttcctgccttgctgaaagttgccgttgaacctgctcggtcgacatccttctggcttgtgtagcacgaaggttgcgtcaggttacgcttgggagctgtccaccccctcattcttcgggtgttcctagtataacagtccaatgacaaagcaacaacggccaataaattcgtggtacaattcatcttcgcttaagaaaacgcattagaaagatgtagtctacatcaggtagaccctactgttgtagtacatgtgctgcgttcatccctgagatgtagaagacgtacctacagaagagggttcgtttgcgataatgctacactgtacaaccaggactcttatagaatacatgttcgtggctgtctcgagtcgagactcccgaccatgcatcaaggaaacgaagtagcgaccacctgctactgaggaatcactactccagtgacgtggaagcaaaagcacatcactaggaagacaatacttaagtatgtatttatgtaattatctcgctgctatcccgatgactttgatctgacaatacaggcaaacacacgtttagactgtgtatgtagacgtacaatgtataggcggtattctacatgtggtttttaccaggacgaccagtcgttgactggcactagactcaactcgtgggaattcgtgatccagtagtgcctcatccctctacagtaccagtacggcactctccgatcggagtggccccctggtggtctagtggtctacgtccctcgaagctatcccattcaaaccaaccagaatcaaaatcaactatcttcaacataaaatcagcacagcagcggacagaatgtacctaccagcattgattcatgctctttcgtaagacgatacgggtccctagagaacataccgtaagacaaagcgtcttacgttttgcaatcaacgcattttgattacatcttgattttagtataccagtggctacattgtattttgtcactcaaaacgaaagacagtttgtcggacaccagtttgcgccatattattggtcaaaagctctacttgacgtgcagagctgcatgtgcgtgctcgggcccactcaaccacgacagcggtgcggatgcaggctgtgttggtggcacctttgttcgccaagacgacgcagttgcatggcgcgtaggtccgtcgacaaaaggatgatattctggctgcagccacggcggccgcgccaggccttgcgtgaagccttagcgctaaggctgttctgatctgttgctcttaaaatgccacgtccagagcttttcagtgcctggatggtaaggaatagtgtcaggagggaaatattgtaggtgttttcgtactgtcaggttgcaatgtacgtatcatgatgcgggcaagccttccttcaataacgtggttacttacgtagcatatgaggcagcgattctagagcgcttataaccgcaccagtctattgctgtctgttaagcttgaatctacgtagtgtttccgtttcggctttgttgacaagtttctagagagtgctcaagcgtacattctagtcgtttactattcaatgtacgctcaagcacaattcagttctccgtgtaccaaccgcgtcgtgtcctccgaagggcatctccctacttacgccgactacgcggcttcatggaagagctcctcggacctcataaaatatgtataatacacactttcatttgcaggacctggcatttagtaggtcgctagttaggccaaataactgtgatgcacttcacattactacgaaatcgaaaacgaaacaaatacacgtccatgctgccgatcctgctcgtcagcacggctatccgttgctggtgcatgccacgacggcgacgcagacggcccggccaagggcatacacggacaacaccacgcataatattagccaatcacatggctaaaattgatttgtcgtcaaactgtcttacgaatgctcgacacaagtgattgatggtgaagactctaagctcgcacatcaatgtaccttactaaaacagccgctccaactgaaggtattctattggtaaacgcatttattatgaagatttcgcaagtttatagtatattaaagtttgtattgaaaacataatccataaacacaaatctactttgattggccaaaacaataaattagggtgacacggatagtgcatcgtatcttagtttatgcacacgggtaccttgcctttggttcggtggcagttcctggtgtcggcagttgcattctgtccgttgctgtagcaagtaaagtgtaggaataaccagttaatcagcttctattccttcttcttcgatcgtacgacgggaattgagtttgctgttctgacggctagttatcgcgtttacttggtagatggtctttgttagagtgagcagatgggagcaatgagggggaggggggattgagacagtagtggtgaagaagtataataccgtagtacgggcgttatattgacgggttatctacccttccgcagagtgagtccgggacccggtcgaagaagaccccaggcaaataacgtcattgcccctttttagccaataataggtcagtagtctgcgcaagtcctttcacagctcattgccgcagaagtctccctcaacctccctcgtcgctcaagaaacaagatgcgctgccacagaggcttctgggtctacgcaggtgacaaaggcaccgacatctcggacagcgctccacgctttccgcaggagcaagcctctcaagcgggccaggtgtcaacaaggcggcagagaattggctccgaacgcgcgctggaagggctccgaagaagcgctgggagggggagacagcggagattcggcaggactacatactgaaaaaccctgactctaccttttcgctggacgacaacccgctggacttcgcggatggccggcaggatcgccggcgctaccctcgaatggtgcgagccgacatcgctacgcctgtggtactacaggaagaggctccggcagcaccaggtacgacacgcacacccgtcgacactcagtgtcgagaacaagttgatgacagtgtgtatgcaagctgcgcgaacacagctgactatgcactctgatgaagaggcggatggtgcgcttcatgagacgccgactagcgcggctgccgctaactcagcgctgagcaactacgtgcgtgataccattcaagttaacccagacttcaaggccatgcacgcgggcaaggaaaactacacgacccgcagcatcaataacttgcaggagttatattggctaggaaaagtaccttcggtgcaaactttgcaagctagtccatgctcgcctgttgtgtcaagggatgcttcgactacatctactacggtgtgccaggcaggggcgtctgtcgagagactcaatggattggttgctgatggcgcagctaatagcagcaacgatgctcagatatcaccttcggctcaagcaaaacctaccactattacctctcgcaaacgcccccggttgctcgaagggaagcagcgacccgccactgccaatttaaagtcacacgcaaccagcggaaaagagcaaccggctggtaatgcggcagatgacgaagatagcgcgtatgaaccaagcaatacggaggatagtgacgtgaatgatgacgatgtggacccccccccccccgatttttcagaaagcgcgtgtcaaaaaattatccgctgatagtgtggaccgatctcgaagatgaagaaaacccccgaagagtgcacgtttaccctgcggatttggatagcttgcaggctggcgtttggctgacccaaaccgcgctggattattttatctgtcgctatatggagcaggttaaaggattaattcgcgtatgtgactcggagttgtacgtattgatggagactgcgcgattcacgcgaaagccgaaacgacgacgccgactgttagctgacctggtcgcattatttgactggtcgtcctaccaatatgtgcttctcccagtatcgggtcgcaaccactacaggtttttggtaattgagaaccccaggcacccggggccagcaaaagtttatcacgtcaactcgatgaaaaatgctcacagctcggcgtatgcttttggtgtgctacaatgggtcctatcagagacccgtaaatctcgagcagaatcatcggctccgtttgagtggagcacctttgtccatttgaccaagccccagcaatcaaattgcatcaactgtggggtttatgttctccattacatggacgtgatttcaaaacacattgcagctgagaagcctggatcgatcgaggagaagatcgccgcgtggccagagggtgatttcggtgtcaagaacgcagcagcataccgaaataagctgtataggactatatctccagagtgattaagtgtagcacccggtgagcagaaacagaagcacaatcaacttctttttaacatggttccggtcattgatatcatggatcaaaacagcaagtaaccgaatatgtagtaccgcaaaatacactatggtacagcaaagcataactgcggtacctatcgcaaaacctcactgcggtaccacattataatactgcggttcaaacaatactgggttattaggaaggagggactacgaaatgcgttcgtcatgtttttctgtgctcgatactcgaccgcttggcgatattctcaagtacgaattatagtacttcagcctgaatgtattcaattacttttagcgttgctccactgttccaactgtgattccttcggcggcatccgtagggctacggtgaacacatacgtccgacagttgacgagttctgaaatattgcaagatacggttgacatcgcggagtggtggtctcaatcgttaccgactagtctctccgttggggctgagatcggagatagtagtcgtggaaacggggtagcgagatacagcgatagcttggacagcatctttgatctcgcccgcgtgtttcgctattcagttcagagatttgttatgggtatgccggtactcctccaatacttgcaaggtagattagttgccacgacgtcagacacccgagtcgccgtaagaatatcatctgcaaacgcagcgactaagctgcaaattggccgccttctattgaagaaccggcgttcgttcgcgctacaccactttgtgccaaactgagcctcgagatctcggacagctctggcgccagctaagccggtcgacgattctttccacaagtccggcacagtagccagaccccgcagaactttatacgttggccaatcactttgcacgtcactagctatcggcgaaactgacggcagtatcgccgtcaccttcgcgcccaccagatagaagctgaacttgtacgacagcagtgccgccttgcagtggagtcgacatgcgcattacgtcgctgaggctacctggaaccgtccgcatggtcgagcagatttgagctaaagaacttttgaaatcctggtgtagcccgtcgattttggcgttcaacaccggtacagctttctgaagacgctgttcagttggggcttccattgcgtcaaccgcttgcatagcctcacgtttaaattccgtgaactcccgggattgaaatatgatgtgctgccaaattgggtgcgttggtgcggatttatgcaagaatatagcatcctggaggatgaccttacggagatatttaagcaactcaagaaaccctccggccgcaagcgattgttccgctgttcctgaagcaatggcctgttgccaaacctccacctgcgaaaataccatactttgcaatgctaacgggggatcaacagaagctcgagcaacaaaaacgctcccaatacttggttcaaaaccggcaagtgtgcgcatcgcctgcctcggaagagatgtgaggtagaatttctccattgattggccgttccaccgacccaaacggcgaatttgggactcacttgcgcctcccaggtccgccatacgcgatccggatccgtgagttttagctttgttgtggacgccggcatgtttcaacgctgctgtaatagctgcgttgtgaactttgtacgacattggtttcgtgggattttaccttttttaacagctttaccggataccagtgctctgaagacgtgaagtcgggaaacgcctcgccatccacatgccaacgccaatacaagtaaaatccaagagttccatgggggcagatctggacatgcttattgcgcatacatgcactgacttcaatgcgcccgacttggttggttttaccctatcgcatcaccataaccagagccctgtatggcgtgtagccctcgttttcgagaacaatcgcgtgtaaggctgccaattccatcatccgcaccgactctcctctcataagggcgtagtggctcagcagaaaagcgaccgaatttcgcaagtgtttacctgaatcacgtgccggtgtccagaaataccgagctatctcctgaacttgatcgattgtcgtatagccatccagtagtgtatcagctccacggtcctcaaaaaaattccgcttcctctcatcttcttcgtactctgtcagcttcaatagggtcgtcacagcttcgtctcggggggagggattactgttcacttttgcgcgagattactgcttctacaggtcaaccatcgccgcaacataggagttcacagcagaacgtccgacggtttcaattatgtcgctgggtgtacttccactcttgtggcgcttggcccggccaattacgcgctcttgtagaaagagatgaatcttctcaccagtaactgtacaccgggtcaggtcattaatgctacgtctttttccgagcaccactctaagaactcctgttgccaactgcggtacgccctctgcgggttcttaggtcgaagggtagtggcattcttgtaggtccgctggaaggtccgctggacagactccttcagggcggcctgcattcgactctctgcctccgtgatgcccattgttaagctgttccctgcacttgggtctccttttcccgtgctggcttggcgcgcgtctagcggcttagcccctagccgcaagattagacgtaattttgcccaaccagcatctagaagacccctcgttaaataacaagttattttacccccaaaacgtgagatacctacaatgatttgatcgaaagccaccaatgctgaccggtcccggtccggacccctctgtgataatgttatacagcgccctatttccaaaaccagttgtataaaatttctaatgctgtccttctttctgcctttaattaacgcccgccggaggcgggagggtctagggtttgttctccaagggtgaggggggggggttaccgacttttgttagttctaatgggagtttagatatacatgtaacgggttgctgtaaaaagggcttgccggctaggccttcatgtagaagtttgtatgggatccacaacgatcagctcctgcattggctatacatgtagtttttgctgggcaactttttgtgggttctattgttggcttagccttttcattttcttataaacaagtactcactcagctaatacatagttgttttcctatctgttggggtcattccctcgagtagtgcgccgcgacccaccaaactttgcatgtgctcaggacgtgggcgacaaattggcagatctctgtcgaagtacttggcgagcggcgcagcacaagcaatagatgatctcttggccgtggtctagccatcgccatgacggataacgttcttgctagtgtcgagcttgcgaattttcagcgtttgaattcatgcgtagctagccttcgtgtaggcgtcttcaagatactttcacgcaacatcgagatcgtacataagcggagggggcgacgacaaaggtagcattcaggtgatttatgaagtttctcgggtattaattatgaaaagtgacactgtacagtatcaggtaccttttggtatggtaatgtatctatatatacgaaatcatctatataattctgggatagcagtaaccccgctgtggccagcccaacacaggttaattaggcggcacctcggtaactgaagccagtaatactgaagccggaaaactggccccggtaactgaagtttactgcctatgctctccatccctcaaatccgagacaagctcgagctcgagatggatggaaatcatctcgaaagttccgttttcgttgagtgccgcgagctgcacttaccgctgaagctccctaccagtccgcacgtcgttggtcagcgttactaggttgtcgctgcgcgcggtgagaccgtcggcaaagtcaactcaactattatttgacaggtaaggaagtacatcgcgcacttccagtgccgcgcttgcagcggaacacacccatgaaacgatccctcacttcatcaatcccctcgtacacaagcacctacagtacatgtactaagttgctgaaggggtggataaagattaaccgtgttgttggttatctggagttcccaatatgcagaatggcacactagctatcatgcagaagtgtaaatactgacgttcttagactataagagtgtagcccgtaggcaccccgagacgttggtatagagggcagaatgccggagaatgaataaccgtggatgtgttgcaatgaatcagcccaagctggatgtagcaggaaactaccagaggcatcggcgaagccttgctcatgtgtcctaagttgctgaagtaaattgctgaagtgaaagaaaaaacgtttgtgtgcccacaagatggcgttcgacagactaaaggttcacgaacacgtacaactgagggcttgcgcagtaggacgtctgttcttccgggcacgtagtgtcagtggccgtggagggcgagacacgagaacgcaggaacacaagcttgcttgcccacggaaagaatgggattgaggaggagaaaacctctcgggtgacaaccccctcttggttaaactatgctatagaaacctcagtataaacaggagcgatacttcaactagaagctccatactgaagtatagtcaaccattgcagctttgacgaacagcggagctcgatcagccactaccagttccgtcactccctcttcgagatccgccacgcagacaacacttatttgccagtgcaatcagtcagcggcagcggcacaccattcagtctctcacgcagtttgcagaactgcgtcgatccaagcggcttagtgaaaatgtctgcaagcatatccgacgtagggcagtagcgtacatcgaaatctccacgttcatacagatctcgcaccttgtgatacttcaagtcaacacctttaattttgtagttgccctccgtagccttgatcactttgatcgtcgactgattgtcttgaaacagcacagtcggatggcgtcggcggagtttcagctcttcgcacatattgtgcgtccaaatgatcatcacggaacactcggccgcagcaataaactgagcactacaggtatcatcttgggtaatagactgcttatggctcttgtaggcgtaagtacatccgttcatctgaagcacaacacccgtgatggatttgcgatcatccttctcactaccgagatccgcatcagcgtaagccgtgaaatgtaaatctgggcttacgggcttcttcctcaagagtccataatcacgagtgcccttcaaataccgtaacactcgttttgccatcacaaagtgctccttggtgtacttgccaagggttcgcactgcatttgcgatctctgggcacgtgccttgcaccaggtactggagacaacccaccagctctctgtagggtatgctggggtcattaactccgggttcgtcctcccccacaagttgagctacacactggacataccgtctagtatgcgtctccatccgactttctacgtcggaaggctgaagccatacctgcagcacgaactacctagctcggctgaaccgaagcagaagactcggcggaagccatcgtcctccagcgcgacttcgcgctggagcagcgggtcgagctaatggtccagctcggccggaacaatcgaggcggtctgggaggccgccacaacctgaggatacttcagagcgccgaacccagcgctctagaactactccacgaccggaactcggtcgtggggagacgcgagatcagggtcaacaccaagttgaccacacacggggcgtgttgccaccaccaccgccgccaattcgtgacgcacacggctcaactcgatggatagttgagcggattgttggtcacagtatcccgagaacgaacaggcaactggttcgttttcgtatccgttggagaggattccctcccaaccaagatacatgagagccacagaacgtcttgctcgaagacgtcccggacatggtgagggcatacgaagcccaccatgcgctacatactggaacgtaatgcgagcgctgctgttaacagcagcgccctaagacacttcgagggcagacataggttcctgcccccgcggcagcgacgcgcttcgcacgtagccgcgcatgctactcagcagcagagagattctccgctgcggtcttcaactacgacgcgctcattccattacgagcgcgctctcttcaaacgtcacgcattgaccaaacggtcaatggtggttagacgtgccgagaccggcacgtctaaccttgacaggggggatggtgtaacggggttacacgcacaagtggctacagtcacttgttactctaacagatgcgatgtctgttagaggtttgaacacttcctcgaccttggtgtaaggtacaccaatggctacatacatttacgaccaccacgacgggtggtccgtacacatttaggattcctattggctgaaagcagcatcttttagccaatgagtgacatgcatagcattggaattctgccaaccagccgttggcagattcctagtttagaatattacatctagaggaagtcagaaacataaaacaaaaattgcagttctcatctttaccaaaacacgcaacttggagtctttatcttgtttaaagtatactcgtggatctcgagtatacttaactcaagtaaaagaaacctacgcttcctcatacacgtgcgcatacgtgtaagccgtagtagtgagccaaggtaggcccactacaaacgaggaagcacgtggcttccaagtctttcgacggctgcgacgagtagggtaggcgcgagtgggcgtacacccgagtggctagagacggcgagaagatcggaactcagttcgtgcacggcaggtagacgtgtattgtagttagacggtagcagataccgcgactagttcatctaaataaaataggtgcggctgtcagtcggacacccaccggcgcggtgtcatacgttttgacatcgacggccagacggacttcagatcgcatcagcacggtcgcgaccaaccccgagcgtgtggggctaaacactttgcagtttgttttgctttggtttgctttcggtcggttcgaaccacttcaaaccaaaccgtgaaaccgtaatgaacctggtttgctggtaatttttgtttggtttgaactatgaacctggaggttggtttgatttgtttcaggcgtgacaaatccagaaaaaagcagtttcaaaattgtttctttttttactaaacttggtaacagaagacaatgctgcaggctgcagcagaatagtaaatgagcaaaatatatctcacgcgaaaagaaaatagataaacagaagacaagcttcggtaaacaccaattgatctatggacaacaaacaaagccctacgttcacttcttgcgctaagtaggcccacagacttagaagttgtacttggatttcttgttctcgagcactcggcgcaccatccagccgtccgtgtcgcgcatagcgtttgaagtgagcgcgtccatgaggcacggcttgaagttggcaggcttcggctgctggtaaaagtccggcagtccgaagctgtggccaatctcgtgggcgacgatcgtaagctggtcgtcgtcgatgtgcgccatcatgtcttcgaggtccacctgctggaagttgtaggttccccagccgccacccagcccctgtgtcggctggaggtaggcatcgtacggcttaccgtcgcaaccactacctccgggcgacgagccatcgaccgagcggtagcagctctcggggcactgcggggctcccttatcgtcaaggtcgccgatgtagatcttgccaagcgagtcgtccgaccactccaggttggaggcttcacgagccgcccagcccacgatgttgaccttgatctcgtcgtacggccagcagttgtagccgatgagccagtggttccacagattgtactggcgggtcagcatggcttggaacttgctggcttgagccttgctgagcttcgtctccttgctgtcccagcggatgcagtaattgagcgtgcccttgttggccacgatgtggtccatgatccagttgtcgtagggctccacctccgccttcatgcggttgtcccaaatccactggaggtccttcgtgctgatgtagctgtccggatcgcccacgacacactcactcgacttggacttgatggttccaaacggagcgtgggcagcggtgctgttcgcggccgtagcgggcgaggctaccaaagcggtggccagggcgagagcggagacgctggagagaagacctggggccattttggataaatggagaatgaggtgttgcttggcaatgcgaagacgcagactcgcaatggcgatgctacgatggccttgacgtttctggcgaccttgatgcagcctgcatggtgtccataaggtgaaggagcaagacgattccactgataacaacaacagtacgaaccgtattcgtgtaagtgtgtaaggtaaggtgccagtttcgtgcctacaaccagttccgtgcctacttgttttagccaattagcatcttctccttgtcaaactctcgtagtctattggtagatttttccagcgtcacatgcaatttccggtgatgagcctcctaaaaaatgctatcaaaaagaggcaggaaactggcagctcactccaaaccaacaagcttttcaaaacaataacaagaagttctgcaaaatttacacggcccagcgtgaagtacataaattcagcccaatcgcgtagatttagcgggtgcaatcagatttcggaatggacaattcaatgaaaagttatgccacagcaagtccgcaagttcgaaggacggcacgaaactggcagaagaccttatgaatacctttgtccaggtgtttacacggactcaaacaggtgctggaagcgaggggtgtccgataggttgatcgctggttttgaatggacttactggtggtgcgtgagcctcgcgcatccccaggatacaactgtcagagaacagcagaattatagaaagagcgagccggggaattgaagccaatacagtaccaaattccgctggccacgtttgtagtggtacatggtcgttagcatgatcccgattattaattcaaagcatcctcgaccatccaccatataaactacctaggtagtgcaaacgcgtgtgccattaaagttcaaaataatggctcaatggctcaagcgaattggtgccggttgtcgacacgtgtgcgtaccacggcgtaaccagagtaatctggtacgtgtagtaggatatcattattgattaaaccgttatgtaagccgagagggaggacttttcgtaccagctaggtttcaccaactaagaagagtctcgagatgaatgactaccgtctaactccgcaactatggtagccagattcactatacactaacaaacagtttgcaaatgctagtacgaatagtgggttgtgcgaacaataccgccatctagagaaattgctacaaaagtgacgtggggcacaagagcaaccgctccctgagacacacttgctgtacagtagtgggtttggcaagtaggcgtcgctctatcctggatagtttcaacacgggcagttcggtcgagccgctcgacatcgactcaagcgccacaaattctcatcaggtgtgcgttcggctgtaccgaagtacttgaactgtatggcgaacgcgcgcacgctgttgttgtcatttctgcatcgaattgttgtgtacacatgcgcatgcaccgcatgtcaagcctatcatagccgctgtttccagggaaagcgtgtaataccagtctaataatagcagctgattccatgcgaagcaaagatcacgaacagcaaactcaatccccgaatactgtacggggaacggggccccttttacagtccgttaaccgcttacagcgagttatcgttctccgcagcccaagacgcttctaaaatctgtagcattgctgtcaattgtaaaatttgccgtagaggagtgagtggaaagtcggattgtcgattcaattataaacattgaattgaattgcattgagtacgatatttttatatgacgaaacacaaaaacaaaagccttcgatactgtacgcggtccaccacaccgctgcccgcatccagcaagccggtgggcactgtacggtgtcgttgtattcccctgagatgctgggaatccccaccactattcacttattaaatagtggtggggaatagtgactattataatacctcacgacttcgatgccacgacaaacaagcatactagttaaaaaatgccccgactttgctgtaggctcattgaacaggttgcagtgtaatcacaaaacgcgaaagcaactcaaacaataaagcgactcccatcttaggtcctgtgcctggtataggagagttgcagagattaatgctgggtaacccagtggcatgtgcaaccttgtcgtacagcaacagtctgcccgagtaaggaacgcctgatatatataaagacgcagaatatataaattgatgttaagttgagtatacttttccaatgtactgatttagttatttcaaaatgaactgaagagcagctttacctacgagtccggaatgattccaacagtggcgtatggtcgaagcactaacctttgaccaggcatcctcgcaccacaacagcgctgtcaactggtcgacctcgtagggattatctagcccttcaccaagccggtctagagcctgcatcatcttgcgggatagaatgtgtcgcttaatacaatgaatgattccttggtccttctccagcggccgccccagcaggactgcacttgacttgattatgcggcatatcgttgtcttgcctggggcggccgggaggctgaactccgtcacagcccactcagccaggcccctgtaggagagagcaggtgtgcgggctgccttgtcgaggatgcccactttctcagaccaagtgaggcggagacgcttggacggtgtggacttcatgggtggagtgggggaggaggtgggcttgtggggcgaggtgcaaaagcaaaagtgcgagtctaccactacggtacatgtagtttgaagtctagtaagatcgctaaatgcgcgccatttttcaaacgagggtggagagctgatgattggcactggatttttcaccttagtacctcagtaccttgcacatccccctatcgccacatcgactgaaaaataatataaaatatgtgaggctattagttgtacacccgttccttatacccgttccttattcgggcagaattctgtacagtacatgtacacgttctatataccttatgtgcttactgacgttcagtcattaccgacaactctatgagccaatcatggactttcaaatattgtaccgttgtagtttattttaagtccttactgacagcatacaaatcacaagtcacaacacaatttatgttttgcaggtcacttttattctgagtcgtgggatggtgtcttcaataaatgtgcttgtcatagcacacgtagagggggtgttgcgatttaggaaagtgcattgcttcgtttggatgagtcaaatgacaaaccaacgcctcctgtagcagccacaaccagtttccttaagatggcgccaagtagattaccagtgcttgtcgcggcgactctagccgcgacgtcttccgccgttgactttagcggtcagaatgacatcacgcaggcgtagggaccgtcgcccccggtgaggaaacgcagaccgggacgaatagcttcaggggctccgagttccaaaaccagtggacgcagacagcgtcttcctcgaataacgcgcccccaacagcctcgagtggagactggaaccagccgatgacgacggaattcccctctgtttggactccgacgagtgggcaggccagcggaaccggatgtcgccgccagcgtcaacggagactccgagtggagactctagtggatacgctaatccaccgcttagcgtggactccagtgggtcaagcgaaggtggatgggacgaaagcgtggaatgcagcgggtcggacgatgatgtggactatgggagtctcgagtgcagcgggtcggacgacgaagaggaatcgcagcagtcggtgccgagttcgactgggggatctgagaactccactccctcgacgacaacaacgccgacgctgacctctagcggagaaaccgatcaggaatcatttcagccgccctcgatagcttcttcatcggatacatccacctccatggcctctggtactgtcgaaaactccagcccggcgacaaccacatcgagtcaaactggagccgaggaggattcgtcgcaggcaatgcaaaattcgtccaaaacttcctcgtacgagagtgcgtcgtcgttatggcgccagagcaagacaacccggcgcaaacgtcttctaacagtacctcaagcgctaagcacgccccattcggagccatcaagtccaagtcgggtgagtgtgtcgtgggcgacccggacagctacatcagcacgaaggacctccagtggaattgggacaaccgcatgaaggcggaggtggagccctacgacaactggtcatggaccacatcgtggccaacaagggcacgctcaactactgcatccgctgggacagcaaggagacgaagctcagcaaggctcaagccagcaagttccaagccatgctgacccgccagtacaatctgtggaaccgctggcttattggctacgactgctggtcgtacgacgaagtcaagatcaacatcgttggctgggctgctcgtgaagcctccaacctggagtggtcggacgactcgcttggcaagatctacatcggcgaccttgacgataagggagccccgcagtgccccgagagctgctaccgctcggtcgatggctcgtcgcccggaggtagtggttgcgacggtaagccgtacgatgcctacctccagccgacacaggggctgggtggcggctggggaacctacaacttccagcaggtggacctcgaagacatgatggcgcacatcgacgacgaccagcttacgatcgtcgcccacgagattggccacagcttcggactgccggacttttaccagcagccgaagcctgccaacttcaagccgtgcctcatggacgcgctcacttcaaacgctatgcgcgacacggacggctggatggtgcgccgagtgctcgagaacaagaaatccaagtacaatttttaactgcaatcacgtcttcatggggaaaggtggtaatgcggagtaagctttttacggtttttgcaagcaattttttctttgtcgctgttattgtgaaaaccgcttcttttgcctattttggttgtaaatctatcgcttagcagcctgatttagctcgatcgatttgtaaatcgatcgcgtccctgctaagcatatgtgagtgggtgtacagattagacgaacgattcagtcaatatagacgcgtttggagcagaatgtccaccttgtactgggcaatcgtgcagcctggcgatgtatatggatcacaaattgtgattcacaatggatttaaaccctgatgtgtactctgattaaccctttgagtaccacccgcttggtagtgacactatattgcgttttagggtagccaataggatatctagaaaccccgtttatatgaccaatcacgcacagctctctgcgcttccagatcaaggtaaaaagaggcttcgagtgccaaaatgtcggataaaacgttgacacctgattcacgctgtgcaaaaatagtctggctttctttctccccctacagactttcactcgccatggatgtacgatactgccactactgccgcgcgataccgtgcgattgggagacgtacggcagcgagctcgttgatagtctaaggcgcctactcgacacgtacaaaaaaatcccgcaccctcacaacgtcagcaaggcgctctatcaagtctactactacctgaagcatggtcggctagacccagaaccaagctacagcatccccgcctgcatcaatatcaaactacaagaaggtacatacatgtagtattgctgtcggttggatacatgtaacttgacgagtttgtgatatgtagctatccaggctcagggtgaagacaagctagttctctgatagtggtgggctgtatgaatatgggctgacagcgctacgctacaagttgatgtggcttatttcgatatattcgaacattctaatcaccaacattcttcgtgttctcaccgattatcgttctacctgtagatgcattcgccagtttgatcgtgattgggatcggcattctgtaagtttgcgctgttgatgactgctcttatgtctatatggtattctactacatcaaagtacatttctattaagtggatcgtgaagcttttccaatgttcaggatatcagccaaacgggcggtgggtcgaactaggcacttggaattgcacagccctcggcagttcgtgcgatggcatctgcatgtaccccggcgtctccaacacttcctccaccctgttgacttcgtcagagccagtgttcgaattgtacagcgtctctcgttggattgatctcccggacaagactgacgagacgccgtccacgattattgttcggcacggagacgtaacggaggtgcggctgctgctgagtcaccactcgctcgtggccactcctgctcggtgctgctagtgttgtttcttaccaagttaataactcttaataactggtattagtaattttaggcatttaataacgatggtattacctttgtgtatcatttgtgtatcgtaatacttaaatattgtcttaagcattttaacttctggaagagcaagcttttgctcatatcagcttcccacacaatgctagcctgcacgcgcgcggtgcgttctccggtcccaggctggaatctctcccctaaatctacgcgtcgctcggcaccagctcgttgctcggtcaggacgtgaacggcgccggcgccacgctggccacggggctcgcaaaaataggcccaaggtgctctacgacgcgtacatcgccccacattcaagctgatcagcaacggctccgcaacgcagtagtcaaacgcccgctggatgtcatcaaggaagccatcgtgtacctgcacttctgcttttcggcccgagacgatggactgcgacaaggccactcagactgcttacagaagatctcttcacgcgccatgctagtggacatgacggagaccgaaaccatgacgctcggcctggccctcgcggaccccatgtatacgtcgacgggcgacctgcaggtcaacggctcgttcaccaaggacctgcgcttcttcagtggccagaagtcagccatgcacgcgctccgtgccgccggtgttggcgtctacatcatcggcgcgtcacccgagttgtacaccgttgcggccggcagttacttcggactaggcgacatggtgcccaaggagaacaggtgcggcgtgcgcttcacgacggacgaggccgatgcttcactgctgagcgacaggacctgcgagttctttggcactacggtgtccggcaccaacaacacctatctcctgcagggcgggcctagccgtcagtacgtggaccacgtcacgtgcctgctggccgagggattcatcaaaaataaagtaagtgccgctgggagagcgtgtagctggatatggtggatctcatgagtttgtgtgttgtgctgcagattcgcaagagagggaagggcttgaagagtatcatatacatcgccgaggtggccattatgctgttacatgaacgaacagctcgctggtaagggttggacgaggcctaaatgttgcgctacaagcgttgatgttacattattactgcattcttaaccaaatatgacgcttctttttttgtgggagtgctagtgcgcgttctgctgtaccaatatgcgccgttgcgctggcagctcagtgacagaagttcaagttgaggtcatctcgtagaagggcaacctgtttcggcgggtactgcacgatgcactgaatatgtgagctaactgatgtgaagctctacgattataagaagagcaagaagagctggcgtttgcattatttgaactcggattagtcagggcaaaagcggtttagccctccacctctccttcacccctagcaagttcgccaccactaaggtcaccaaagtgttctgcgaccgccatggccacgggtccacacgcagcttcaccacgcacaagcacagaaaggttgtgtgcgcgctgaaacagggtggtgaggccggcaagagcaaatcgaacatcctcggctgcgtgcatgagtgatcaaggctcgagtagcgcgacgacgaatatgccgtcacgtccgacaagcaccatcaagtctacccctatcatgaacaactacccaagtccgcagcagaaccaaaactcctcacgagaaaatgaagcggaggaagctgctagaaatatcatcagccgaggcagcatctagaagaaattcgaaagaggttgaagccaatgcattgatacacatttgcatgaggacgacgactctatttgactaactagtgcatgatatgtaatcaagaaggcgtgaacggaatgaaaatatggatcgtgttgcgcgtgaacaaagtcaaatatgctaatgctcccaggttggaccaaacagcaccctcggcgagtggtgggtgcgtccagtgctcgactgtggagttggaggtagtccacatgctaccccctgaaaatacgagacgatcgcaagttggttgactcggtgttgttgcacttgccgatccgggcggcctcacgaccggtggcacaagctggcgctcatcagcacgcgtgaaaacggttccgctgcttgttgactgcgtaagtgcgaccgactgcgtaggagcgaccgactgcgtaagagcgaccgcagcctcgtcactgcatactgtgctggtattcgtcgcttggtcgggtagcgggttggctagcgcaggcgaaaatagtgttcttcgagctagcgggggtgggacagcttcacgttggtcggtctgcgagggcgtgaagaatcgtgatcggtgcgccgtattagaccgactaccgcgcatgcgactggagctgttgggagcaattgacgcaacgatgtcatcatcgctgtagtcgtcactcgcgctgctttcgccctcttcttctgcattgacttgatagtgcactgcactagttgcagccttgtcacccgcattcgagtacaaatatgctagcttttccacgcgatcgggtttcagccgatttcgtcgcttggtgcggatgaaggagtgaacactccacgagcgctcactcgcagcggacgacgtcgggatgctcaaaacgcgggtagccaaaacatgtaggagcggaaacttgttaaccttgaccagccaccagtctaatggcgtgtccctcgcgtttttttcgtggtcttcggctgtccaggacttcttcacgcgaataaaagccatgacagctcggcgaaccgcatttggagatacgttggagggtagaccaactcgtgtagctagatctacgcatgcatcgactgcattgtccaaatcatcaccttcaaagtcgtccgtagacttagttgggtccagtaaaaatgcagcgaggattgattcgcgcttgaggaagttccagcgggagctaatctggcctcggatcgtgttaagaataccagaagcaacatcatcagtttcgcggttgtagatgacgtgggttttcagtccacgaaagtattcatacaccatcgaaaggcaacacccatccttttcgagagcgccgagagcttggattatcgggttcgtcagtcgcattacggctctggcattcacccaaaacatgctatcagccaaaatggactcgacgcgattgagtttggcagcagcatctccgtaacgagccagaaattcatggttggaaaacaactcacgcagcacatcttcgttcctcacgacactggaaatacaatttgtgctcgagtaccacagcgtcgaaacagggatgattagcgcgcgtcgtcgctgccgggtaccaagatacttgcgttgcagagcccgaaagcgataaagaagcgctgcacgtttacgcacaaatttggtaactaggacggctttcttgaagacgtcactcatgagctccatcccgaacatgtctttgagtagaagattgatcatgtgtgccgcgcagccgttacacgttagacttggtatcttggccattagaagctcccatgacttacgcctgttagacgcgttgtccgtcacaacagcgcatacggatccttttccgacgacattttcaacagcttgaatcaacttgttcaactctgacgccatgaactcccctgtatgttgtttgtcggcgcagcgctccgatgaccaaaatatgggtcggataaatggagacgtcaccataaagttgataatggactcgctgttgggatcggaccatccgtcgcatacaatggcaacgtactgctgctccctcagcacctccataacgctgacaacttcctccgcgtacgcgctatcaagcagtgaggtcgccaaatcttggcgtgaagggagcgtcattccgggccggtacttcgtcaggatacacctcatggctccattttcgatgactcgaaacagaatgccgcaggcatagaacgctttggcaatctgaagatggaactccttttcagtcactgagaccggtcctagcacactcgtagccatttcaggccgcgaacgcttggatggactgtggggcctatcggaagtgtcgggacgatctcgcttggagggtgttactgggtaattagcccggacgtccgctggggcgcagggacagctgcgaatgtgtgggcggaggtttttcttgggctgggcattcttgatgagcttggagcagtgcgtgcacgtcacgtcggggtgctgcttcttcgggttggcccaacgtggcacaaccacaatgtactcggtccacacgccaactgaagggcgaccaaggccagacccttcactgctagcccggtcctcgttgcggtggccgttttggtccatggagcttgcaggctctacaggagcaagtttgcgaatgcagcgacgagaataggccccgtgcgcgagctgcctgccacgtggagcatacgcagattcatgtcggtagacctccacgtacgttgacaacttcacgaaacgcgttgaccgaatatttctgccacaccaactatacacatgaggtattaccgttagcagatcgaatatttctgccacaccaactatacataaaagttattgacgttaataaatggaaagtacgaaggtaataacggtaactggtaatatctggatgaggatttgaccaactctagacacaactactgtatccttggggcatggttgagagagttacccgtgttgtgagaagttggctacgaatcgatcattcgcgacggcccgtagcccacagcatcgcgccaattagatagttaagctagttacttccagaataccaagatcaaattggcgactttcgtgattgctacagtgtagcggtcgaattcatctcccacataacaaaacgttataacttctttactttaaacgatatcaatattatttttctattgggtatagagaagaaatttcgtatagtaccggttagtttttgtcggcaaggctgcagcagttctgacactctgtgcccagtcaaatcgactgttctgaaacaggccacttatcttgctcggcttgttgagcaagtcatatagctacgctgcgtcggtcctacttcgagtcgctgcaactctaacaccctctggtcgacagcgatactcaaccgctgcacccgatcgtccgccacagtgcgttcgaccgaatttattaggggggtatgcaaacctcttctaccacgcaagttactgtcaacctctagtcagcactaacctacgatcccgtctcgtgttccacgcagggttcccagctccggccagtcactcagtcagcgcttccgtcaaatcctcctcggtctcgtccttgtagagcttgcgctctgtcgcgtacgtgtccgtggacccgctcgtcttgccctcgtccgcgtgcgcgtccgagtctgttgcctgctgctgcttcggcagcaaaatccgttgtgtgtggcctcctctcgctgccgcagcccgctgctccgtccttcaatgtcgactcaataggagtcaccaactgcagctcgctcgagctgcttattgtgccactcttggacgcgtggaccacacagaatccgccctccgccaccgtcacgacctcgaggaccgcccccgtactgcctatcgtggacctgctgtcgtgctccttagccagcggcttcgtgtcgccgtccgtcaccacctccagcgtctcgtaggtatccaccaccgctgctgtttgcctcatggggtccatctgcccgggccccctgttacagctccatccaaaatcaaccagcaaatggtgtgggtgacccattgggtcccgctaaggacctggacagatgtattgaatgaagtatattcatgcgcaggcgaatacagcagctcgtgcggttgttgtatcgcggcttggccatgccctctcaccttgaggtatcacgtagactgcatcaaatacccatagcctcaccacagcgtgtctgcgtcttgcgtctttacatcgccaagaaaatcttcattctgcattcatccacgatggccccaagtcttatttccagcgtctccgctaccgtccccacaaccgctatggttgccacgtccactgaggccgcgccatccgtgaacagcactgctgcacacgctcccttcggggtaaagtccaagcctggtgagtgtgttgtcggcgacccagacacgcacatcagccccaaggatctccagtggatttaggacaaccgcatgaaggcggaggtggagccttacgacaactggatcatggaccacatcgtagctaacaagggcacgctcaactactgcgttcgctgggacagcaagaagaccaatctcagcaaggctcaagccgccaagttcgaagcaatgctcacccgccagtatgctctgtagaaatgctggcttattggctacgactgctggtcgtacgacgaagtcaagatcaacatcgttggctgggctgctagaaaggccactgacctcgagtggttggacgattcgctcggcaagatctacatcggtaaagccggtggcgcggtcgagtgggttaagcttctggcccttacgctatggaccgagggttcgagccccacagcggacattagtttctccgatcgagaagtgtatagaacccccgtagaggaacgtccctcatggcccaggcggttagggcaccctgacactaaggggaaataaacgtagagaacagctggcttataggaaggacggtttcactttagaaagtaacagcaaggacctcggcggtacgagaaatgcccgtatccacagaccccagatgggttagggggaggaataattggcctatcagaaacaaaatccatcctggaaaagccacttgcttacgaagaagtgtaggtaaaggtacgcgctaagaaatccccgcactgtgacacataatgaggcccgaccgtccccacaagggaaaatacaaactttattggcctatcagaaaagatctacatcggcgatctcgacaaggacggaaccccgcagtgccccgaaagctgctaccgatcggtcgataattctgcggcgagttattgggactccagtaactgcgatggcaagccgtttgatgtctatctccagccgacgcatggattgggcggtggttggggagccggcaatttccagcaggtggacctcgaagacatgatgccgaccattgacgacgaccagcttacgatcgtcgcccacgagattggacacaactacggtctgccagacttttaccagcagccgaagcctcccaacttcaagccgtgcctcatggacgcgctcacttcaaacactatgcgagacacgggcggctggatggtgcgccgtgtgctcgagtacaagaagtccaactacgacatctaactttgtggtttgctttgtccaaaagaccagtcagggtctttgtttgtcgttaatagatcaattgatgtttaccttgcacgttcttcctaaagggggcctcacaaatattttttgacaaaaaagttgaaatataaaatcaacgcgctctcctgaaggtgaacatctactgactgtgttcgttatgaacaacgaacatggtctttgtgtgcttttcttcatgtagtttctagacgtagcgcgagtcagggccaatccacatgcttacaagtgatagttgggcttcttgtttccgagcacacggcgaaccatccagccgtccgtgtctttgatcgtgggtgttgagagcgcatccatgaggcacagcttgaagttaagaggctggggctcctcatagaagtccggtagcccaaagccgtgacccatatcgtgcgatacaatggtaagctcgtcggtatcgaggtgcgccaccatgtcgtcaaggtccacctgctggaagttatagattccccagccgccacccagattctgcgtagcccacagagagatgtcgaaaggcttgccatcgcagctgctgtacaccgaccagccaccgggagagccgtccaccgagcggtagcggttgtcgtggcactgcggagagcccttatcaacaaggtcgccgatgtagatcttgccgagcgaatcgtccaaccactcgaggtcagtggcctgtctagcagcccagccaacgatgttgatcttgacttcgtcgtagcgacgaagtcaagatcaacatcgttggctgggtcttcttgctgtcccagcgaacgcagtagttgagcgtgcccttgttagctacgatgtggtccatgatccagttgtcgtaaggctccacctccgccttcttgcgtttgttccaaatccactggagatccttgggactgatgtaaggcttggacttgataaatgggtgcccaacgtacgaacggcaaaatttatgctggaagtacagcgtaggcagctcggtgctgttttgctctgttaaagcacagtacagacgacatggcacaacgtggtacatggaagcacatcgaagacaaaacaattgataactgacctggtcgcctccgataataccgagtaccggtattctcttacatcaaccaaacgctcttcgtgcgccacaagtttcttcgtcggttgtcatctgacgtgtgtcggcgacggaacagcgaatgttgtcagattctcaatcccaacgttagatttcactacatggataggaagagaactccattgagtcaactactaccctcgtgttggtcgaaggcagcattcaccagattccaaattttgaccggtcgcggagaagtgtcagaggacgcctccaaggatttccggcccttggccttcctgggaggaatcctccctcgggatcacaggaaggagcaagacgacagcaatggcatcttcaaggtggccagggtcgacgaagggtgtcgacctcgtggcacaacaggctgatcaagacggtaggcaaaacagaaacgaaaagcagggtgtattggtgacgacgaagcgcgagacggcggaaagtatgatggagcacacagcacttcttaacagaggaagcaggagtatacaaactccaagtgaacagccgttcacgtgtccttggtctgaaggggacgacttgacttgaaaagcggtagatctaagactgaatgtatttataggttggtacagatttggcctgcatacaaatcctaagttccctatagtttgtgtcatacaaaacgtatctgttggctctgaggccacttgggtcactatccaggggagtgaccgatgtagccatcccggaatagtgacagggtcactattccatgtaaccccgttacagaaagagtgcagactgctggccacgcgatcttgtaaggctatcgtggcgtcaggatcgaattccgacgagcgcggcgcagaggtgaccgctggattgacgaagagcgagacggaagagaaggacaagagggaacaaaggtgaacaacgtgttggagggacgcgtagaggtggtggactccggaccgacgaagcgcgaaaaggaggggttgcatatcttttttagcaattgcatatcgtaggtgtatatctgggtcgaatgccctagtggcatttggttggtgtatacccgtgtgtttgggctactaccgcgggcggaggcccgtgatccgtaggcgaagctgcagcagtgcgcggcatcgggtgtagttagccgtctaaaccgcaacaaattcaaattcaaaagcattcaccactgttgaccctacttgggggatactacgtcgccagagctactgtacttatcagcaacatgggtagtgcatgacgctgtattcctgacgacaccaatggtctctacatttctgaacgaatatttgtagaactaaaagattttaccaaatactccccatactagtatttattagatccccaacaaaatggtcgttggtagcatgagagttgatatacatatgggtgaggcctctactagttatcgaccgcattgcacagtagtgtactagcggatctagcgagatagtataaaacgtatgcgcttatcgtaaatcttaggcaatacatctcatatttttcagtggcacagaacgtactgtacagtaaaattttagtaaatcgatgctattgcctagtgtattcaagccaccgatcctttacacgaaaagacgtgtgctatgatagccatgtcgtcatgaccgtctgcagagcgacgatagaattgtagcgggggaaagcggaacgaaatgatccgcttacgagcaaatgtcgtgggtcgtctcgacgggattcatccgactctcctttgcttaactttaagtaacagatcgagggtgaaacaggcgtgcgctttaacgtaaactgcttgaaaaaccagtccgagactaacggcaaatttatccggggggcagtggattctagcatagatcattttttattaatattgtcagacaagctggatgtggtacatgtatgcgcagcgttggaagagccattgcgtcttgtgttgttggatgaaactgaggcgacatgcaaacgcttcagtacccctcttcgcctctcagacactcgctttccgatactgtagttttttattaacccctctaaccccgtattatgtatcctacagaataagcattgtcacaggacataatatccagcaaacttgtcctctctttcgaacttcgcatatggatgtttgtatagccggtattgtgcacatcttcctgttagattagcgatgggaagataaacggggtttattccgcggtaatagtcggacgagtataaaccaccaacaggtttgaaaattcgggtggaagcctaaaaccgccgcgtgctagccactcgtactttccttcattccgaaactgcgctgttcaagacgtcgcaatgcaagctttgttggagcccgtcgagcgcgcccaagtggccaaggaccatggccgaagacgatcatgatgagcgccattgtgatctacaggtaagcgagagcgtgtactttgctctgtaacattgtactagtggtatattgattctacgttgcgatgttgattaccaggcctggtgatccgacccagacgacgctatgagctctcgcgtgtggcccgattggcagatcgattgcggagtcagcgcacaacctcatcggttcctacgaagccggctacggccgggtctaccgctatattgtagctgatgcagtggctacccaagaggctacagaagaagcgctcctcatggtgtggctacaccggagactacagaagaagcggtagatgctacgacggatgctacagaagaagctctccgcgtgatgaggttacaccggagattacagaagaagggacagaggctacgacggaggctaccgatgaaagcggcaggaatggagcggcagtgccggaggctacagagcaaagcggaggctgccaaaatggcgaagatgacccacggctggcgcgaacattgaagagcgtgcgcatgtaaaggaagcagtagacgttggcatgaatatcatatattgtcctgtttcgtacaagaggaaccgtgtgtcgtgcgtgtcattacgggctattgagcatgcaagctccctggtgttgttagagagacaatcgtaacaagcttgttaggtgggctaaagaaatctaatgatgcgctaatgtcaagcacaaggaagaattcgcccagttcctcctcactacgtcagttaggaacagggcgatttcttcctccgcgtttatcgcgacgtgccgaagatgggtggctggagccgaagtatgctgcgttagcagccttgcaaggtattaccatgtagcaggttttgagcgtgctctacgctcgccacgaccaatagaagctcgccatttcggtatatggtggatacattgagcatgttttgttcactttcgttgctgttctgtggacaatgtaccctgcgcttcaccgcaagatgcgaaagggcttccaacagcaaatctttgacaggttttgaagtatactttaatcaagtctaatgtttattctgtaggatacagaataaggtctggggctagaagggttaaccaataaaatgtcataaccaataaaatgtccattttgtttcaaatcccgaactgagaccaatgcccgagagccccgcacgccggcgcgggcccaagccgctgctctcaatggagcaggagaagcagctggcgcagtgggtcctggcgcagcagagctcaggtcgacgagtctcacgtgacgacgtcatcagccaggctcgagaaatatcacgactggatgagacccaagaaggagaagagacgaagcccagccaatcggttggcatggggtggtgcaaccgcttcgtggcgaggcacccggagctgaatttacgctccggagctgctgcaatagtcaagacgaaaagtaccgactcaaatgatgcaactgtaaatttcacgttaagtggtggaacgctaatggatgcagcagtggaaggccaagaagctgagagcttaaaggtttctgagccttcggagcaattggagggtaaagaggaagacacagaggctgaagaagctgctgagccgaccaagacgaggaagtacaaccgcaatcatatggaggcggctgtggagatgtacttggctgggaaatccatgagcgaggtgacgcagcgcttcccgctgttgcatcaacggactattcgacgtcgagtgttgcgggtgcaacggggcgaagtggatcggagacgaggaccacgcccgctgctggagggccaaccagagcaggagttggtggcatggattctggacatgcaatgtcgaggaacgcgcgtgaccaagaaggacatcctcgcgagagctaatgaacagtatcgagcgctgactggagagacgaccgaggatcgactgaaggaaggatggctgcgcagattcaaggagaggcaccccgtgctgtcgggtcgcgctcctactaaagtgcgccaggagggagaaaacaactcgcagtcaagtacagaaagtgaaaaggagttttcaagtggtgcagacggcgagctgctaggtagcgcacaatcgatgggtggacaacagagaataatgtctggaggagaagagaagcaagagtcgcagaagcgttctgaggctgctgtgagtggagttgaagactcagcagcgtcgtcgaagaagcagaagacggaagacgcaccctcaactcgaagtcccagagctgtagctgctacgagtcacagtgatagtgctagtggggtttcagtcttgcctgagcgacgccaagctgaaaaagctgagaacgtgcaatccaacaatcggctggaagaaatgcagcgtcagcagctcgaaatgctccagcaactatgcgcgtcaaacgatgtgctgtcgcgcattgctggctcgaagcgggtattcaagagcaccagcacagaataagcacgtggatggcaaccgtctctttttcgagctggataacgtcgcttcgcggtcgccaaaggatcttgtgtgttgccatgaagggctgtcttctggtgttggtgtgcatcctggtgtgctgtgcagacgccgaaactctgacgtcgagctgcatgcgaacgtgtggcgagttcgagcagtgcttcgtgtacaaggactcggagttctgcgctgaagtgtgcgcccccggtcggtgcaacgacgacaccgaaatgtgcacgttgagaggcgtggtgccgtgtacgaccgagccgtgtttgcctgaagcagtgtgcgagcctcgagtcacgtcaatggtgaccaactcgaccgcagcctcgtcttgcgagctgcgttgtcagctcataagctctccagtgtgcggctccgacggcgcctcgtacgccaactcgtgctttctcaagaaggcgcgatgcaccactggaaatcccgacttggtggtggcgtctcgagggatctgcgagcgtgaaaaggctctaaacgccaagtacaatcctccaccgtccagctcagctgatgatgctgcaacttgtttggctgcaatcacttgcgcggacgtgctgggtcctgtgtgtacgagcgcaggcacaatgcgtaacctgtgctacttcaaccgcgagaagaaatgcaaccaggcaacgctgtcgatgatccgaactgggtcctgtgaagactcgaatgtggtgcctctctgtccagcgacctgcacagacgagtacgacccagtgtgcgcgtccaatggccagctctatggcaacgactgcctatttcgccaggccaagtgtgcgcgacgtgaccagcttgcagtcaacatcgagccccgggtgctttcggagtgtgaagcgtaaattgttttccaatcgatataaagtcttttacttgctttgtttaatgtgttccgctctcgacttctccgagtcaaatcagcctacaaaacatgctccaaaaggtgacagcgtagtcctagctcgcagtggtcccatttactgagctccctgggcacccatggggttgtgttggtgcaggtgcaccgagttcatattgcctccgccgtcgcctccgaagcgcgggtcgtggccactggccagcggtcggatgccggagagggtcttgagctctgtgatgatgcgagcgcagaggttcatgtacgtgaaggcgttgccgtccagacgctggaagtccagcaagtaaatgtgctgctgcaccttgtacagctggaggccgatcttgatgcgctgcatctgctgctgcaacttgagctcgtccgggctcagcacggcgcccccgttctggttgttggggtctcctacaggcgactgccaccggcactttacgcggtacggcgccacgaccttccattcaaagtggagcacgaacagcgccttgtatacttccgacatcacgtgagccggctccttcttcgactgaatgcccaggtaccatcgtcgccgcttgggagtgggggctgcgccgtgcccgtcatcaaatccaggcatgccatttcctccggccgcggacatccgtggtgcttgacctgggatattaattcctcgtccaccaaaattccgagggtcaggcagcgctgacgagggcgtgaccaagggagatgccgccataggaaggggtcctcgtccagggagcagcaaagtgctaggttcgggagtcgagaacgtcttgggtttgttattcaccgttcgcacatcacgcagttctagacacagcaaattaacaacgttagattaagagagcagaaaataaatggctctatcaggcaaaattcagctggatgagatccacgagaagcaatggacgtaccatcaatacggatcttggcgttcttgtgatcaagaataagttcgtacgccacgcggagcgggtggttttctcgcctcttgagcaatgctactagctggtcgtggccgatatttgcggcgtaattcagagccaaacactgggacaggcactcctcgtcaatcttgaaggttttgtgttccacgatctccggcgggtgctgcaggtacgggggcaaatcaatctggaaccatgggtgttgcctgatctccgggatcgtgatgcgcttcatggggtccaccacgagcatgcgcgggatgaggtcgcgcgccatctcggaaaggtggctgggcagcgagtacataccgccgcggatcttcttgaacaggttggggatgctctcgtcgtcaaacggcaggctgccgcacagcagcgcgtacaaaatgacgccacaggaccacacgtccacttcaggaccagcatataaactgccggagatcacctcaggagctgcgtagttcggggagccgcacgacgtgcgcaaaaagtctccgtcctccatgctgttggacagcccgaagtctgcgatcttgatgttattgtccgcgtccagcagcaagttctccggcttgaggtctcgatgcacgatgcggtggaaatggcagtactccacgcccgagataatctggtggaaaaagtgtcttgcctcctccggcgccaactaaataacaataaacataaaacaaaaaaataatggttaacacctcacaaccacgacaaaacctcaacaacaacaaaaatccacacccacccgtcctttcgacacaatgtagtcgaaaagttctccgccggcaatgtactcgagcaccataaagatgtccgtgggcgtgtcaatcacctcgtacctagaaaaaaaatatacaccataaaataccgttattttcctggatccccctaataatttgatgcaaatgtggtgtgcatgtacagtcggatgatgtgagggtggcgcatcttgcgcagcagcgtgatctcgcgccgcaccttctcgctcatgtcgaggctgcggatcttgttgcggttgaggatcttgatggccaccttgtggcccgtgatgtcgtgctcggccactggttagacacatacaaagacgcagataggtccgtcggcaacaaattcacctaaacggggtggcaacaagtggctgaacgcgagtctctaaacgtctctaaacgtacgcttgaccttgccgaaggagccgatgccgagcgtcttgcccaggcggtagtggcctagctgcacggggatgtcgctcatggtcgaggggggacggggcgagcgtgcgctgggggcgggcactcggactcgttacgtgcgggtcggtcggcgctaatcggcttcgagtgtggcgcaaagaaaaacgggtcaggccggtatgtagtgtgcgccacaccaacggaattaccggttgtggtaccggtgagacgaggtagagaggtagagaagttggtgtgtgctacattgaatagtgagccctacagtaagtgcgaacccacttcagctcagcaccggaaaatatctggatgcatggctgcttcggcgacaagcaggcgtgttacagctcgctcggggacgcgggagacaacttcaagccgctagctaaggctgtcggtttgcgggcagctacagtatctatctagcgtcaatagcaagcgggcagaggcgttagcagaaatacgcgtgtgtatctccgatttgctcggcgctcttcgatcagcgtcatccatccgcccaagggtttctgcccgtttcgaacggctcgtgactcgtgcggtccgttggtgcgttcggggcttctttctcggtgcacgaacgccgctctctcttgttgcagctgtagcggtgcccatgagtcggcgaaggcaccttggccttggggcgttcggcggggcgagtgtcagtgttgaagtaccttgggccccgccgaagctcgcaatatgctgggagaacggtgtatgtcggcggaggatctcgagattttctttatattttcgacgctggctgtacatacgctgcagtacttgtagctactcattcgtctgtcttcgcggatgactcgcgagtttcagaactcgcgttttcgacttgaaagatctggcagaacgtggcactggcattgtcgaagcgagcgaacccaggtccggggacgccaggcgtggccacttgcttgccggggaggtgcatgcatgcgtggacactttcttgtcgagcacacttggccgatcggctcctccccgtgtgacggcagccatgagacgactgccgccagctgagcccgcgccgcggcggaagtggatttttaacatgaaacatcgggcggctgcaatgtgtatacgaaaacaagatctatggcggggtaactcagcgtacacaaaacaacgaggagcaaaaggcatgtctgcaatgcatgtttatcgtactcggcaaaatatgtgtaaagtgctagcggtgagatgcctctcgtcgcgagcaggcaccgccgttgcagacgaattttgtgcctctgccgcccgaacgatagaccgttctcgaagcgagccacttcaaggtcggtggtgccggccagcatcccacgacgagagccaatatttgtggcgctccatggcagcgcctgcggctcgcgccactcggtttcaaagcgagcagctaccgagtgtgggcgctacgagtccttatctgctgccgctatcagttgggctctctcgtcttgcgcggctggggagctcctatactttcaacgttgtggatcgcaggcaaggttgggattggagtcaataaacagtaccgtatcgtgttgcgactcgcaacttgcgagtgtactgtactacgtatgaacatcggctcgcagcgcatggtcgtcacggctgtcgttggcggcgctcgatgctgctgctgctgtacgcggtcgtgcctgcggccacgactatccccggctcgctgtgtatgtcggcgtgcgatttctccggcgtctcaccgcgaagacacgttcactcgagctggctgccgccttgtagctgggttgccaccactcaattcgccagcggtaacgctgctcgacgagcagaaatactatcctatttaacatgtatggatacaatatggatacaatatgtacatcgcggtgaaccggataataggcgatgccactgaatctgtggcatggcttactctgtgccggagtaatacttacttgcctagacttcgcggcctgtattcccaccaccggatcctcgatgccgttgggccgatgcagactgcattgcagttaggccgatgcagactgcattgcagttgggccgatgcacttgctcgtaaagtaagtattactccggcacagagtaagccatgccacagattcagtggcatcgcctattatccggttcaccgcgatgtacatattgtatccatattgtatccatacatgttaaataggatagtatttctgctcgtcgagcagcgttaccgctggcgaattgagtggtggcaacccagctacaaggcggcagacagttcgagtgaacgtgtcttcgcggtgagacgccggagaaatcgcacgccgacatacacagcgagccggggatagtcgtggccgcaggcacgaccgcgtacagcagcagcagcatcgagcgccgccaacgacagccgtgacgaccatgcgctgcgagccgatgttcatacgtagtacagtacactcgcaagttgcgagtcgcaacacgatacggtactgtttattgactccaatcccaaccttgcctgcgatccacaacgttgaaagtataggagctccccagccgcgcaagacgagagagcccaactgatagcggcagcagataaggactcgtagcgcccacactcggtagctgctcgctttgaaaccgagtggcgcgagccgcaggcgctgccatggagcgccacaaatattggctctcgtcgtgggatgctggccggcaccaccgaccttgaagtggctcgcttcgagaacggtctatcgttcgggcggcagaggcacaaaattcgtctgcaacggcggtgcctgctcgcgacgagaggcatctcaccgctagcactttacacatattttgccgagtacgataaacatgcattgcagacatgccttttgctcctcgttgttttgtgtacgctgagttaccccgccatagatcttgttttcgtatacacattgcagccgcccgatgtttcatgttaaaaatccacttccgccgcggcgcgggctcagctggcggcagtcgtctcatggctgccgtcacacggggaggagccgatcggccaagtgtgctcgacaagaaagtgtccacgcatgcatgcacctccccggcaagcaagtggccacgcctggcgtccccggacctgggttcgctcgcttcgacaatgccagtgccacgttctgccagatctttcaagtcgaaaacgcgagttctgaaactcgcgagtcatccgcgaagacagacgaatgagtagctacaagtactgcagcgtatgtacagccagcgtcgaaaatataaagaaaatctcgagatcctccgccgacatacaccgttctcccagcatatcgcgagcttcggcggggcccaaggtacttcaacactgacactcgccccgccgaacgccccaaggccaaggtgccttcgccgactcatgggcaccgctacagctgcaacaagagagagcggcgttcgtgcaccgagaaagaagccccgaacgcaccaacggaccgcacgagtcacgagccgttcgaaacgggcagaaacccttgggcggatggatgacgctgatcgaagagcgccgagcaaatcggagatacacacgcgtatttctgctaacgcctctgcccgcttgctattgacgctagatagatactgtagctgcccgcaaaccgacagccttagctagcggcttgaagttgtctcccgcgtccctgagcgagctgtaacacgcctgcttgtcgcgctcgctcgccaacggccggcgacgacacatctttctcgccccgcgcgccagccgggctcaccaccagcctgtatcgcaagtgcaatacaccgccgattgaagatcgcaaatcggcgagaactaacatctacaagacgacggacagcgagcgagcggagagaatccgccaccgcaaaaatgccatggccatctccaccacccgcttgcaagccatggtcacgatgaggttgccttgcgtgcggcgaagtccatcaaatttggttgacctccttcatggcacgggtgtgaatcgggcgaaacgccgtttcgagcttcgagcaccgctttcccgcctcattctaatcgctttcgaagggctcgggtttcagtatcgcaggtcgcctctctctttcccaccgtcaatcccacctgtattcgtctacttgacctcgcagagcatcaagtctcgcagtgcgcatcctggctttgttttgcgcgtgtctgactagcatggaagagccaggccgccgagcttgggaaaagcagtcgaccgcacgacgcggtcgccaccagcagcttccctcgccgacgcgggctctgcgccattatccttttcgccttggctgccgcgtcgtccatccgtgccgacgccattgccaacagcaccacagcacagcatacaggcgttagccatccatccatccatccatccacacaactacagtacagccagccatgagtctcaagcgaccgcagcactccatggacgagctggcctcgcccgagcgcagcagctccagcaggaccaaaggcagcaagagccgccgcagccgccgcacgctgcacagcgccgagtcgacgtgctcatcatcgtcgtcgtcgtcctccagctgctccagtgacgcgggtttgccgctggcctcggcgccgcgcaccgtcgagatcatgtggggcggccgctcggcgcccggcttcacgctcaagcgcaagcgcacgggcgccatcctcgtgagcaccgtgacgcgcgagacacaggtggccacgacgctcaaggtcggcagcgagctcaagctcgtgggcggcttccccgtgaaccgcctcacgctgcaggacgtcaagaaggtcatgctcatggcccccaagcccgtgagcctcgtgttcgtgaacgcagacgacgtggtcattgccagcgtggacgacgtggaggccgacaggaaggaccggcggtcgctggcctccacgacgctctccaccgccagcctgcgacgcagcgtgagcgtggacatgaacagcctcaagcgcgacgacagcggcgaggacagcgacagcagcgaggtgtccaccgtgtccgcccccgccttctacagcacgcccagcgagagcaacaagtccaagaagcgcaaagtctccacgctgcaggtggcgctggatcgcgtcaaccagctgctgaaccgtccggtgcggcaggccggcctgcacatcgcggccggcaagagcatcgtcgtgtagacatccacttgttcttcttcaaccacctgccaccaagctcttcaacatcacttcaacccgatagaaaagggaaaaacagcacaagacgaagcggagcgagcagcgcgcgagccattaggaagctcgacgcgggcctgctgctctgctccccccctcctcacaccgcagaaactgctctatatgtagtatttattccagcacatgcgaccgccgaccgagatgccagggtcgacgcgaagagaaaaatacacatctgaaattggccatgtgctcaatcaacacttttgtgtcgctaatgaaagtttctaacgcgtaggtacctaccaatctgtttaacaagagcttacctataacttgagtctcctggggaagttgctgtacgcgccggcagcgatgcgcagcgtgtgcttgaagtcctccttgtcgatgctgcctcggcctgaccggtcggtgtactggaagcagcggtccaagtcgttgcggaacgagtgcgaatgcttcccgctatgctggaacggagtgagctcggcaatgtcctcgagtgtcaacagaccgtccttgtcttggtccaccatgtcgaacacttggttggcgcactgggcgaacacgtcgggctgctgcgtttgaagctgcggccagtccaacaaggcggcgcaaaactcgtcgagagacaacaagccgtcgccatccaggtccaggttgcgcaagaagccgatggcttcgcctcgagtcagacggtagcctccgctagtcacatacgctgcgaattcctcgagtccgacgctttcgctgccatcacgagacacctcgctgaacagcaccaccacgtcctgctttgttgccagtggcagcagccgagtcacctcgttcagtacagcgtgctgcagactgttgagtgatctgtaaagctgcagcctctggactagtgtcccgttcagcactggccctgcaatgcccttggtggcttccttggcagcagcagaagccgtcgtcagcgctccaggggagagaggggcgctgggtcgaagccacggatgtttgagagcctgctcggctgtaaggcgtttagagacgtcgcgctcgagaagttgccgaaccaggtccttggcttcgtcggagataccggtccacggcggactttcgaggtcgatttcttcgtgtaaaatacgctcgtcaagcaacgctccggactcgaaggggaagcgtccacttagcagacgatacaaaatcactccacaactccagaggtctgacgggtaggcgtatttgtgcttgagaacctccggcgccgtgtacagcggcgtgccgtgcacctcgtgcaggaattctccatcctccaagaaggcagctccaccgaaatcagtcagcttgagcggactgtcctctttcgtgtcggcaaacataaagttctcgagcttcaggtctctgtgcaaaatacgcagcaagtggcactgccagaccacgtgcaggatgtccctcatgtacattttcgcccgctcttcctgctttgggtttgcagtcagatccagctccttctctctggacaaccttgccgatgcgtctccgcccacacaacgctccatcaccaggtacacattctcgtcatcctcgtacgctccgaagaaatgcacaacgttcagcgtgccacccagcagcaccatcgtgcgcccttcctgtttcagcgccgcatagtccttgcggctcaccactcgagacttggacacgatcttcaccgccaaatccaactgcagttcactaccacgcgaggtctcctgctgcatcggtaacgcgcaatatacttctccaaaggccccctcaccgagtttatctccaagcttgtacttctcgaggaagttccttggcagattgaactcgagctcttccggcttcgtaaagaagctcgcggcctcaagcgccacgtgctgaagcttcgggtacgacgctagcttgtccatgtatcctctccagctcttacggatgcagccgtagtggatccccagcggctttcgggacgaggagacttggctgctgtggttcacgaacgccgaggcaccaggcgtcaccgctgcgtctgcctgttgctgaggcgggtgctggtccggtgcgaccaagaagcagcggcgttggttgctggaggagtcgggacgcgcgcggacgaggggcgttgagcgacgcaaggcggagggtatcgccttcatgcttgattcggggatatcacgacttctagaggtcggacgacggcgagaaaagcatgtacgaatgcgcgtgagtgaggcgaacgaggtggtgcgcagcagatctacagcgagggcctgcgcgaagcaggagcagacgtagcgcgagccgcagtcgcgctattcgtagcgatcgtcccgctgactaggtggcggccgtttcataccaccgagaagctcccaagcgaagccatgtctcacggccacacaaacggtacgcaagctgaggtaccgaaaagatggtacgctccagtttaacggcgacgtcacgcaagcactgtcgtcagcggtgctcttgacacgtttgcatgatgatgcgagttgattgaactccaacttggaggcgacacacacacatcaagcggacggtgcgagctggcgtgtggaagtcctcaaggtagttgatggatggggtaaaaggctcactacacgcttaaattgaatggctgtcgataacatcggcagctgcggcctcacccgcaggcggtggcacctccgccctcctatctgccggcgagggtgacttgtccttctggagacgcagcacgctgccggacagaagccgactcgccggcgacagcaagaacaggatcgagtgcgacagcacagcggagtcgtcgtggatctcgacgtttgcttcgtccccaggttgccgcggcggcagcaaaacgcagtttacctgcacgttgcgcggctgaagctttgtagcgagggactttaccaacggctcaatggcggcgtcatctttagcagacgcaatattcacaatggtcccgctgctgggggccagccagccgtcctcaccaccgtccggaaagcagctcgtggacatggactcggtgagagcttcaacaagggctctacaacgcacaccaatagcatacacatcagcatcattggtgcgaatgataaaacctggaaaaagatacacgggacgtacgcgctcgaggcgatgggctcgcttttcgtagcatcttcagcagcgtcttcgggctgctcctgagtctcagcaagcgtcttcaccacctcggtaccggcgaagttaatcaggaaatcgacgcgctggtatttggaagcgatagagctgcaccactcagcaacatccttttgtgtccggaacgaccccagcacgggcaacatcacaccacgagttgtgtcttcgccctcggaggggaagcgagcgatatgcttggtattgaaatcgtccagcgccgtcatattcctgcacgattcagcgccaaagtgagcaaagacacctcttgcatatcaacaccagcatgaagcagcacttacgtaaaggtgagcagtacgctcgcccccaaaacccacaattgcgtcgctagagacgccacagacttgttgtcgcctccggtgaccaccacctatcacgattacagcacatcacagcaagcgtgtcagcatatcgttttgagcaggacggtagcttctgtctaaaacgtaccagcttgttgtaaaagactgtctgccattgtgcagacatcgcggcgtcttgatacagcatgtgtgaagccaagccgtccacaccaacagccgctccatcgtgaggaaccgctccattcgcacgcaacatgatcatcccaccggccgaatacgccgacgccgccattgcagctgcatccttttcacccgcgggaggggtagtcgcaagctttgcgcgcttgcggctgccctccaggtcctcccgcacgttcatatagtcgcccagagcgcgtttctggagctcggtatggtccgctgcagtcggacggacaggagcgcccacattctgcagctggttatacagtccgttgttgatctccgtgcgcgcattgcagcggccctcgcgcaggttctgcaggaagatctgcaccgccaggtctccttcggcctcgcgtttgtacttgagcagccgcatgaactccgggtgtttgctcatcaggtggttctcgatgcggccgcggcggcagttgaggcggctccagaccttggtcagctcgcgcttggacgacgggtcgtcgcacagcatgcagacgatcacctccttctgcttgtcggcgcccgcggcagctgcagcggcgacggcagcggccgccgtggcccctccagccgtgcgaacggccttgatcactcggccgtccatctccgtctcgggcagcgaccgctcgacgatcggcagcgagtgcagccagcgcttctggaaggtgaagacgcgcttgcgggacccggcgccggccgcggccttgggcgtctgctgttggatggaggccgcggctgcagccaccgctgcgtcagcagcttcggcgaccacttgcgcagacgaatcgtgcatggcgggggcggagaaggaagatgccgaggtgggggagcccgtggcgccgaccaccttgtccgtcatgacttaggggtgctttgacttcgtgccggaattgtttatatggcgctttgtatgtgctcgaatggtacagtttgaatggagggctggtactcggttacttacttaggttacttacttagggcacggcgtggattgtactccagaggtgacttgcggttggccatcatcaacgaaacaagattttgtatagtgaacatgatctaaatcagtatatgaagcagtcattgcggtacaatgctgcttatttaaaggtattagataccatcattccactacatgaactacattacagaggtaaacaactgtggagagtgttttgtcctagaggaagttgatcttgcccttcgaagttcaccattccccctccggccaaaagctccaaaggctcccgccgtcctccacctgcgtcgctctccctccctctctctctctcagcggcccagcgacgtctccgtgcctcatgaacgcgccgtcagctctgagctcgctgtacttctcggcgccaccggcgaccggcaacttccaggagcccaagcagctgctgccgctgccgctgccggtgccagtgtcgaagcccaaggcgaactcgaccgtcacgattctcccagcgcccaccgccgtctcagttaagacagatggcgtctcctcttgcccctcaacttctgtgatcgcccccatgagcccttcaactccccaagttgacgcatactcggcactcaagtcgaagttgctggatcatgagaatcagaatcagatacagcaacctgaggagatgccgtcgccactgccatcgcctgtgagcgtcacgggcaagagaaagcggctggacatggacgacgagctcacgtccttcttggcacccacgcccaccaagcgcaagggcagcagcgacttcctgcggaaaggtcaatggaccaacacggaggagcgactcgccaggctcctgatagaggcctttgaggacgggtatctccccatctacacaggtatccgactgcgtggctacttggccgtgcagttgcagtgcgaccccatgagggtgtccaaaaagttgtgtgctgggaccattgacggcaagcctgtgcccaagaactacgggcagaagaagtttaagctgcgcaagaagccgctctgggactgtgaagaggcggagagccgcattgccgagctcgagcgactgaccaaagccttgtggaacgaggcgcgcatgaagaagccgtcgttccttacgctctcgactacgcgtaatgtgagcaagaggggcgatgatgagtctgcatcttcgccgtctagtccagcggacggccgcgtgccgtcgtcaacccccaagtcgaagaagcaaaaggtgttccctatcatttatttaaacctgtccaagaagctcaagcactactcggttcgcggactggacagcagcagtagcagcggaagcgagcctgcttccccgtccaatgactccgactcggacagtgaacccgtaaggcttgacggtgagtcactgcaagctgcgtatgatctgctgactttatgtagtccacgaggcagcaaggtcaagtccaagaagcgtgcttcgaagaagagtaagggcatctctgccaaggagcatacatccagctcggatgcttcgagcgaggacgctgcttgtaaggaggcatccccggaggacaaatccagtgcggacaaacccaatgaggacaaatcgaaggaactcaaggctgcagaagatgaacccagccaggatatctctaccaatgaggctcctggcaataacgtctccgttgaggacgctcctgacacggaagtctccaaagcggatccccccattgcagatgatggcaacaaggacctgtcctgcaatgagaactccaatgaagtccaatctgacaaggctgcggaccctgtcggtgaacctcagctcgtcagcgacgacacctgcatggacgactcgctctccgcctcgacgtcgtcgacgtgatgtgcctcaccgcagtccgagcaaactcaccgccgtgcctccaacgcgttgtcggagcattcttgggctccacactttagtatctgaaccccatgtcgttttcctgtaatgaactgcgtgccaacttgactacactgtacactgcacctgcaacaaatcccacttcaacatgaagtggctccgccaatcacagctcttctttcgtctaattcgccagaattctcactgtagtatcaacaacttttttttgacaaaaagtggggtgatggctaatgaatggcttgagcaagtcatgcacactcctcgattcacggtccatgtgtcatggtgtttcactaaggtacaccgttccaacgttcgagcaaaacctggtatcgttgaagttgaagagatttcgatacgatgaactgcatcccttcaaattcgttcgctatcgagcccgaaagaaatgaatcaatcaatgcaccagcacccaggtttgacaggcggggctcttccatctactgttagaggatccatgttgacaagccctgttggtttcaatcgacaagcatgatcagaaccctatttttattctccccattgcgaactgaaaataccgtcctcttcgacgcttacgaacgacatcttatcgtgtttacatgtcattcaagttctcaccactctctcccctcaactctgctgatcgaaggtgatgcgcagatccgggacgctcgttgacctttacaagtctacgcaagtcaagttgcatggcatttactcctcgaagcgagtgcaagagctggcgaaattcgtgcgcgccacaagttgggtccgctctctcgcactcgcagtggcaacaccagtgctgagcttgcttccgacgcttctgatcgacattgtcccgctctcgaacccgtcggccggtgtcgattcaaacaagttgttctacgtacgggtgccattcaccaatttcgcttaggtgtgctcatacttgcatacccaattgcgtgcgccatccgcgatactctattggtatccacgctcgcttgtgccatggactacggcttcgctctagttattggcttcccgacgccgtttatgatgcagcttgcgattccaccatggtgtgcgatgatcttggtatgcttgtcaattcaatggcgaaactcgatacatcaagcagcggaagcaaccagaatgttggtggatatactcaagatctggtgctgcgatgtgctgctggtcgcggtgtacaccccctactttgctgctttcacaaatctgtccgctcaccgccagatgtggctcgccctgcttcttccagctttgaagctgttcatgcggaacctcttcgcgagagctgttggtcacttaggcgacgaagcgccagaaatcgtggtgttcaatgctgatgtctttggctcgttattcgtatcgtgctgcatgcagctatcgccttcgttttggatgacgctaggagttatgcttgcggatgtttttctcatggggttatccctccgtgatttaaggattgtaaacgtggaactgggggatttacaacggagacttgaccaagagtacacgtggactagtcatcacggcgcagttggtcacatcagcttgcgagatcgtgcacctacaacgctggagcgcgctagtatgctgctagatcaagaagccaactcaattggtctcactccagttgccccctgtggggagcctctcctttcatcgttgggctcgcaacaaaacggagaaagaccgacccataaggtcaaaacgaaaaaccaatgcgtgcgactgcccctcaggataaagcgactcctaaataggcagcatatcgtccccataggcgaaaaagacagcaatattgtcgatgagaagccaagtgagccagtcacacagagctacacgatcaaagttcggcggatgctttacatggctgaatatctcctccttatcaactacgtcgaggtcatcatcccgctcgtatattgtacgtaagacttgcgtcggatgcattaggcatattgttttacagtcgctcacagtttttctattctctaattgtgtcgagcagcttgttacttgatcgctacgtaccacatgccgaaccacgaatactacaccgtctttcaagggatggatcacgctcgactgtatcaaacactcaagaatgtgcagctgtactgcttgtttcagctcgtctcgcttcttttactcatgtataaactgaagttcacgttggggttcccaccggttcagcacttgggatttgtcctggaaaaccagatccagtgggtgctacttcacctcacgttctggatcatatacaacgtacaaggatcgctggagcacctaggttggttgtaaggaatgtgtattgtccgatgagttagtgtcggtctaattattattttcggcagggaatgactatacctttaagtgtgcgtggctgtcgactggtaccccttgaacacttaacagtaagacagacagtaaattacgccacaacaacagcgatcagtgacttttctttccatcttgaagtagcggattgactgatacggagaccaatgtactggtggcacctgtttcccccagaattgaattttctcgactgctacgacgatcacaatgtggctccgcgacgcttgcatacgagctgctcagcggcagttttcttccactgatgtggagtatcttgaagctgtctgcgagagatttatcgtctacttgcagcggccaaaatctgtgcgaggacgaaaaagtctgcattgacaacattatcccgtccgtggcaactgtgcagagctctagcttcgtagaaagtcgactgctgtttcagctggcgaacgaggcacggcaacgcgaggagcttggaatgcggatcttctacaggtgcgccgtgatcagccaactaaggtcttgcggagataccctgaagcaacagagcgtcttcagttgtggctgttcggctcaagtacaaactcacaccgcttaaatctcgggcaatttatcgctacgctatcgaaaattggtcatccgttgacgaccaatggattaaactgtttacagaagatggagctgatggatcagtgaaaaaaaaattgttggttatcattgacgttctagagaagaagtcgactgtgaacaagtcggctgagcctcgggacgccggcaagttagtgagttttgctcttgattcggcaagtgacgttattgcaccaggtcctcgtgcagtggattttgcgaagtatttcgctttgccctcgttcaggcaaacaagcgcatacgcaaatatcatcggtcgggcggaatgttggcagtactggtcgatagagacgccgaagttgctggctttaaggctccaatctgctcgacagtgaaggaaactctcccttcgttggtgatgacgtacacgatggatgcgttctggcgccgctactgtgataatttcagtatggacaagattttggcgcactaattcggtgcgacgcagaataatgacgtagaagcgctgacatcgttggtgtcgatggggcgtcctctgtggggttgtagcacgtttgacggcatcctggagacttatcgcttcgccaaccaattcgatactgtgaatagtgcaatcgtcctggcatcgtgcaagttgatggccggactgtatccgaggatctcgaactacaccgagtacaccgggtttggtgtcgcgtcggtactgtgtggactggggcttcgttggcgtttcaatgcgtctcgatcggtctcatacttgatggggacgctagcgtacttactcccggagtgtgacaagcttcttgctgtcaactcctcgaacctggtgctggctttaattgcaatgagactttggtacacgtgggggcgattatgtgtctttgttgtccgagtatatcgtatccggctactggtgttagaggggcgtgctgtacacaatgtaaacaaactggtggcttgcatcgtgttgctgctggtgataggcaaatgctcgtgctgcagaatccgtgggaaaatcacgggacatgtaactttcgaggtgattttgtgagtgcggggttgctcctgaaagctcttggtggggccaatccgcctctggtgcgttcaagagacagatgtgccgataggaactctttggtggagcgatacaagcagtggcaagtacggcgggctgactggaagctgggattttgccacttcattcggctgcaactggagcctacagaagaaacgctgtggtatctgtttgatcgtcgcgctgctggggtatttccgcgcgaccgagataatgaagatcttgtgatcccgatgtgccaaagacctgaggcatcaatgatcctaattcaagtggaccgggatggcgactttgatgaaaatattgcgttgatgcagcgtccctgcgtattttcaagtgagaattctctgtcgacaattccgcttcaagatatcgcgagtttcaatggtctttgaaggagagcgatcgtcgtgtagtgatcccgatcagtactttgttgctgacgaataggatggattcacgctgtgcattcgctccgtgtcgcgtccgcgggatgtcacggtgagcaaagtcacacttccagtgatttcgcaaggtgtggcgcagaaattggcgggcatggtgtcgtccagatggagctgccaggactgatggccactgacttgaacaaccggtgtgaaaaggagatcgagtgggctgatgtcagattaagcccgctcatatcggagactcgtcaccgaatagggaattcttgacgtgctgttgtgggcgtcgctcacgccgctggtgttcctgacttcccagtgtgcactttgaatctgatatctggtcttttccacgacgatgagggagattactgtgtcaaaagcagatttttgagttagataggtagcagtggcgcctggtcgacccgaacgactactaaaaggttggtaagaattacagtgacacctccctaaatgaacccctctaactgaccatgtgttccctatctggttaggattcctcgactgtggatttcactataggtgttctataactgatcaaaaacctctttattctctaaatggtcgcaattgttggcgcctcaaccctctaaatggacgccgtagtaatagatccaaactcatatatttttctcaatcacttgccagcctcctcccacgtatgccattgctaccactactcccgccacaagaaatcgagcgaagagagaaattttatttgggatgctaagttggaacaaagagtttgcagtaactgcaagcttgtgataaataagctagccacagtattttacaatcagcgcagcctacatatatatatattacgaaaaactaaaatattatgatgtcgagacaactaggggctatgcagtacataccaagcaaaagataaatctgcaggcatggtggcaggatatcgggacaacaaatattcctataacctccctgtattgaaactcacgtacaacctgaggggatgcgattctgctaataccaatgagaataaggagtaggaacagacaataccgcgcctaccgttattggttgagttctgtttgtgtgaagacgaaacaaaacaagagtacaaaaatgctggaggggtaccaggtaaagaaagcccttgtgcacctaacatatgaaaatgtagccattaaaagtgtagccatttctttatctgatcaattctttaactgaaacagcgtattagaccgagcgaactgggtgtcatttatagaggtgtcactgtatggtgctttgtttgttgatatgaatgactcagcgattgcttgctagtatgctgggaccaagtaaacgcatgtcaagggttgtccatcgaactctcttcagtagtagctagcagccccagcgttcgttcattttggaatttaccaaccaccaagtcaccaccaactatcaagcactcaacgaccactatcatggtgcctgcaactacgacgacaccaagtctgttggcatgacctaccgtttcctgggaaattcaggactccttgtatccaaactcggtctggggagctggatgaacgccaaggaggcgaacgcagcggaagcctagtacgagatgatgaagctggcgttcaagctcggcatcaactccttcgacaacgcggacgcctatggggagggtctcgccgagaaaaacatgggcattgctgtgcagaagggtgtcgatgaaggcgtctggagccgggaggacctcgcgatcgccaccaaagtcggtctggggacgaagggcttccgggacgcatcgggaccgaacgaccaaggcttaacgcgcaagcacatcattgaagcgaccaaggcctcgctcaagaggttcgatctcgagtacgtcgacgtcatttactgcattcggcccgatgtgtgcacgcccatggaagagactgtgcatgccaagaacttcgtcctagagcagggctgggctttctactggggcacgagtcagtggagcgtggctcagatcgtcgaggcttgcgatgttgcagaccgcctcggcctcgttcgccccgtcgtggagcagtgcgtctacaacctgctagaccgcaccaaggtggagttcgagtacgccgacctgtacaagaagtacaagctcggtctctcgacttggtcccctctctctggcggactactcacgggcaagcacagccaggagatcgtcaaaggttctcgtatggacggccccttgcgcacattcttcgcgcctgatttcgtcgagcgccaagccaaggcggacaaactccagtcggtggccgcagagcttggcatctccctgactgagctcgctttggcgtggtgcatcagcaacgagaacgtctccgcggtcatgatcggggccaagaacttggcgcagttggagctcaacctgaaggcgctgcctgcgttcgagaagaccacgccggaggtcaaggcccagatcgacgcgctcgtgccgttcgtgccgcagctcccaaagtccgatggattggagaaccgacgcaccaagttcctctaaggcactgattgtgaatgcggcgggcacagctacagcaatggacggcaccgataaatccttcaacatgaagcagcatacttagtacaggtattgatctagcaactaagttgcaattgatgagtcaaaacctggtctgtatcgagggcttcgagtgcgtaatatactgaaattgagctgatcccacgacgagccatcgctatcttcatcacaactgcggctctagcatcagtacatctgctgcagatgccgtcaagtcctcgtccggcgctgtcaccgatatgcgcggttttgaactgacattggcccgctcgatctccttttcacaccggttgttcaagtcactggccaccactcctgctgggctccatctcgatgacacgaagcccaccaatttctgcgccacaccttgcgaaatcactggaagtgtgactttgcccaccgtgatatcccacggacgccatacagagcgaatgcacagcgtgaatccatcctattcgtcagcaacaaagtaccgatcggatcactacacgacgatcgctctccttcaaagaccattgaaactcgcgatatcttgaagcggaattgttgacagagaattctcacttgcaggatgcctgtatgattgccctattcacagcatcgaattggcctggtaagcccccaggatgccgtcgaatatgctactccacagagggcgacccatcgaaaccaacgatgtcagcgcttctacgtcattattctgcgtcacaacgaacttgtgagctgaaatctcgtccatactgaaactatcacagtagcggcgccagaacgcttccgtcagcacaaacggagggagagtttccttcaccgccgagccgattggactattatagccagcaactccggcgtttccttcaacacggcatcgtaggggcaatcgaggagttcattttgaatatgagccgaggcttgaactgcacggcgaagcggggctgtgaaagactagcccctgtgatgtggtgggcgggttgcgagcgagcatcttgctggtgtcgatcgctggatcatcgacgctgctcggactgtacgctgctgctagacttcctgaatgaactctcgctaactaatttgctctgacgtcctcgcgcctgaaactactgttatcttcgtccaggtattcttgtctggatgtaccgctgatccttggtacttggtacttgaagtacttgcttgtactctgcctctgcaggaaacccgagtatgcttcaatctgcgcctctcttcactgcacttcgttacgttccgcttgcttcgcccgaatgctcgccatctctatcgggtagtactgagaaaatttcacccgaccgatgatatttgcgaatgcgcttgtttgcctgaacgagggcgatgcgaaatacttccgtaaaatgcactttgcgagggtctggtgaaatgacttcactacttaagtagctgaatcgagagcaaaaaccactaacttgccggtgtcctgacttgctcacaatagcctccttatctagaacttcaatttatttttcactgacccatcagcagacatttaatccattcggcaccaacggatggccagttttcgatagcggggcgatagattgcctccatccccagacttcagcggtgtgagtttgtacttggatcgaacagccacagcagaaggtgctctgctcctcgagggtattccccccccaaacctcagttgactgatcaagtgcgcacatgtagaagaccattcaaagctcctcgcgttgccgtgcttcgtttgccacctgaaacaacagtctactttttcccgaaaccagagctctgcacaattgtcacggacgggataatgttgttgatgcagactttctcgtactcgcagggggttcggtacacattccagcaccccggcaagtacacgagaaattcctcgcaaagagttccaagatagcccagatcagtgagagaaaaccgccgctgagttgctcatatggaggaaattcaattctagtggaaccagtaccctgcgggatggaaagaaagtctagattactgtcaatattttacctgctgagtgcttaaggggtaccagtcgacaaccacgcaaatttgaaggtatagtcattccctgccacacacaataattagaccgacacttcagacaagtctacataacttctagtacaaccaacctaggtgctccagcgatgcttgtacgttgtatatgatccagaacgtgaggtgaagtagcacccactggatctggttttccagcacaaaccccaagtgttggagtcccaacgtgaacttcagcttatacatgagtaaaagaagcgaggcgagctgaaacaagcagtacagctgcacattcttgagtgtttgatacagtcgagcgtgatccatcccttgaaagacggtgtagtattcgtggttcggcatgtggtacgtagcgatcaagtaacaagctgctcgacacaattagagaatagaaaaactgtgagcgactgtaaaacaatatgcctaatgcatccgacgcaagtcttacgtacaatatacgagcgggatgatgacctcgacgtagttgataaggaggagatattcagccatgtaaagcatccgccgaactttgatcgtgtagctctgtgtgactggctcacttggcttctcatcgacaatattgctgtctttttcgcctatggggacgatatgctgcctatttaggagtcgctttatcctgaggggcagtcgcacgcattggtttttcgttttgaccttatgggtcggtctttctccgttttgttgcgagcccaacgatgaaaggagaggctccccacagggggcaactggagtgagaccaattgagttggcttcttgatctagcagcatactagcgcgctccagcgttgtaggtgcacgatctcgcaagctgatgtgaccaactgcgccgtgatgactagtccacgtgtactcttggtcaagtctccgttgtaaatcccccagttccacgtttacaatccttaaatcacggagggataaccccatgagaaaaacatccgcaagcataactcctagcgtcatccaaaacgaaggcgatagctgcatgcagcacgatacgaataacgagccaaagacatcagcattgaacaccacgatttctggcgcttcgtcgcctaagtgaccaacagctctcgcgaagaggttccgcatgaacagcttcaaagctggaagaagcagggcgagccacatctggcggtgagcggacagatttgtgaaagcagcaaagtagggggtgtacactgcgaccagcagcacatcgcagcaccagatcttgagtatatccaccaacattctggttgcttccgctgcttgatgtatcgagtttcgccattgaattgacaagcataccaagatcatcgcacaccatggtggaatcgcaagctgcatcataaacggcgtcgggaagccaataactagagcgaagccgtagtccatggcacaagcgagcgtggataccaatagagtatcgcggatggcgcacgcaattgggtatgcaagtatgagcacacctaagcgaaattggtgaatggcacccgtacgtagaacaacttgtttgaatcgacaccggccgacgggttcgagagcgggacaatgtcgatcagaagcgtcggaagcaagctcagcactggtgttgccactgcgagtgcgagagagcggacccaacttgtggcgcgcacgaatttcgccagctcttgcactcgcttcgaggagtaaatgccatgcaacttgacttgcgtagacttgtaaaggtcaacgagcgtcccggatctgcgcatcaccttcgatcagcagagttgaggggagagagtggtgagaacttgaatgacatgtaaacacgataagatgtcgttcgtaagcgtcgaagaggacggtattttcagttcgcaatggggagaataaaaatagggttctgatcatgcttgtcgattgaaaccaacagggcttgtcaacatggatcctctaacagtagatggaagagccccgcctgtcaaacctgggtgctggtgcattgattgattcatttctttcgggctcgatagcgaacgaatttgaagggatgcagttcatcgtatcgaaatctcttcaacttcaacgataccaggttttgctcgaaatgaaacggcggcaactggcgtaccatttggaacatcgtggcccatgggcctggccgatgagtcaaggagcgtgcatgacttgctcaggcaattagccatgggtccagcgtgtccttagacccccctccccctctttctacagtatcgctttccatgctggactcctggaactctgagcttgcccaatattgagggagatcttctgtagacgatcacggctcatccttgcgtgctcgttagcacacgcttgattttgagatcgaacactaagctaagagcgtcatatactgtgtaccatcatatcatatgagtatttcacaccgatgtcatatcatataaatgtcatatcttttataatatcttatcgctcatattggtcaaatcgaataggtagtgaaaaattactcctgaggcttgagagcagtgagtttcacatgcgaattcgtcgtcgtagcagcaactgacgcatggccgcagctgtcgaagcgcggtggacactgtgtttactaaagctctgccagcggagtaaaccatgcccgtccacctctcattgcgtccaagcagctgcaaccgcgaacctcgtttcagacatcacaaagcgtgccggactgagcaactggtggttcaggtgcgcttttttcggtgggtggccaagtttgtcttattcattggttgaagttgtctgaattacgcgctctgattggtctcgagcacgtgttgaacgtattgccaagcctggacgatttgtacgctacgtggacagcaatgcagcaatgctgaatcagcattgcttcggagcaatcgcagtcaaaccagttctgtcacagtgcgaggcattcacgctctctccacaactgcgctgatggtcaccgtcctcctgcgggcggtttgtgcatgtgggtgccgatctgcattgcagcttgttttatgaccaaaaagcgcgtgccgtacccaagaaagcatcaacttctcgagtgtattgttgatactcctcttttcatgctgctgctagcatgacaaagatgaatggacaagatcggccatcagagtgtccgagcggtccattggactaagacgcatgccgccgctgaacaccataccacagcggatcgacccccggcacagtccggctcgtgccaccgtccaacggcagtcgagcatcgttttcctactaaaactaagctcaaaatggagctaccgctgtggaggaccggaacctggaggacatagtgcgatctattatcgattgtggccgctgttttctcatgacggcaggtgactccgttatccggcagcgctgcccgcaggatgcgttgttgcatggcgcgctttgcttcccgagtgctcaatggatatccgtcagatgcttcgccgccggcgagattcacaacgatgcttcatgccaccgagattcaacactcaggacgcacttctagccgaccaacaccggctagaacttggtccatagcccactgtgagctcacatttccaacgatagcattgccatcggaggcgggccttgcagggaactcacttattaaaacttaggtaaaaacaaacagcaaacgccgccgaagtgcgcggctcgtttgctcgctaacgcgattgggcttgcgcgcgagtcctgcaggcgaatggagcggctgcgcggcgctcactcagctcgcaagaacgggtcgcgccggcctcacggtcataagtcacagcgatgtggtcagcgctctgacattttcgctcgactggccacacgcgccgcacggcgctatgtctgttgttccttcaaggttcgccacgggtggctttgtcttttaacgaactcttagcccagctcatagaagcgcaacagagttcgagtatccgatatctcggtccaagatcggcgccagtatccaatctgctccatcaagaccaagatgccatctctgaatgccatcgctggcctgctgcctcctctggagatctccatccaggagagcagcatgctggtggacctcaccgagacgctcacgcagcacaacatcgcgcagtgcagcacggtcattgtgaccagggacggccacgccgactcgagggcctggaaggagctgcgacgcagggacaacatccgcgtctacaaggagcgagcgcgctccagggccacgcccaccaccccgtccctgctgctgctcggcaccgtcaagggcaacctcgacgacgtcatgtacgccatggtgacccccaccgagcaggccatgaagatcaagtccaactgcacgcacgacggcgtgatcgaccgcaaggtgctgcacgagatcgtgcgccccagcgtggacgacccgttccgccacgtgagcgtcaactggtcgctgtacgccgactcggagccgcacgactacgtgtgcgtcgaggccacgggcgtcacgcacacgctgcgcggcgagcgcgtgggcttccacctgtcgcactcggtggcgttctcgcagctgccgagcttctccgagtcgcacggcgtggagcgcggtcaccggtcgatctgctcgctgtaccgcgagacgacggcgggcgaggtcgagtgctacgtgcgcggcttcttcgacttccgcgacggcgacaacgagctgctgaccaacatcgcgctgcacgcgatcgccaaccagtggctgtcgttctcccggcagatcgagttcgcgcacatgaagaagctcgtgtggcgtctgcgtcgcaacagcagcgacttggacgacttcgtcatggctgcggccgtggaagagcacaagcggaagatgtcggaggcggctctgaatcgagaagccacttgccgagtgtgtaacaagacgttcgggctcctggaccgtaaaaccacctgtaagagctgcgagcaggctgtgtgtcctcggtgccgagtcaagaagcgcgtgtgcgtgctcgctccggaccaacgtacggtgctggagaagagacgcagcttctgcgctccgtgcattgctgaagtcaccacgagcaacgcgcgggctattgcgcaggaggaacttcaggtccaggaggaagatcaaatgaaggaggcggaagagcaggtcgtctcgctctctagacaacgcacgacgtcgtggatggctaccagtgcctcctttcgatcgtgcatatagaaataggtaaaatgaaaaaccaagccgtgctaaagcacggagaagctctggattttatcatgtagttttgattctaggtttgattctaagttaatttatcttaaatgtgcctagcagttctacccgaggttctttggttaaagcgaagtatccttaaatttcagcagttggtgcttttgtctttattcgggtttgctaccaagttccgaaaccatgaaagcatgcactgccaactatctcaagcccttacgcgaacatgtactggtcactcgctatgccttagctatcttgcaatattatgcagccgaatcgtcaaggcttgaatgcggcggtaacggtacgtatgcacgtgcagaatggttgaaacgagaccaccatcgtttgaagacttcaacgacacccacgactttaaattgaagtcgtgggtgttcgtggggacttgaacgtggcgacaccgatgtaacatcgttgaacatacatgtactgcaaacacaactgcagttatgtttggagtcatggtcgagtcatggtcgagcgacatccgatcaatcgtgtcacgcgaatgtcgaccctaaaagactcaagcaacacgccgctggataatatattatccaagcgtttattaaagttaacgggtacgttccgatacgttaataattcgttcgtttataaccgatagcggagcatgcatttttatagtgatttgcacctgcagtcgtatcgccctaacaactctggataaaatccagagaataagcagttaaacgaggtgcttcgagggcccggacgagttaaaaagtgccgcaattgtttattttaactcaaaaactcactaggaccaagcggtatgtaccggttttttcagcgcttttagcccgaatttcaatcgtgtttcaaccgttgatacactgatcaaacaccgagcaatagtatagtactctccataacaattgtaatatttagtattaatgctttattactggtactactaatatttagaatgacaacgactattcgcagttcgaagaactgtcgattggggaaggtttttggatgacatcgaacgacattcacgctacattcgtcacttcaccccgatgacatcaaacaacattcacacaacatcataccgcactcgatcgaatcggtctgaatgacacttagaggttttgatgggtaacctccagttggggtcatatacggtacagatctgagattggatctgacgtgctaaaaggtgttctgggggttgcaccccgagaccccaaactaactccgagttgcggcaacggtgctcgtcgctgggcccgcctccgcaataccgcgcggccctgcttcgcgggcaccacgcgcgggtttgctatggctacgctcctcacagacgcacctggtggtacgtcttctccggaaaaagactaaaagctagctgcactagcttaggcgtttatctacgaagaatgggatgatttaagcttgtcttgtgtgagactacattgcgacccgcagagatccaccaaattggtggtgtagaatgatctactacttgatcctgttcttgtcaagacaagttcaaagtacattgttaccgatattagttaagatcatcctaatgccacacggctgcgaagcaggcgcaggggatgccatagtacatcgtctccctgtaagggtatccgtacacgctagcttcgaactgcgaaaccccccgggtccaccacccgggtccccaattaggctagtatttagacggacggcgatccttaggcacttcaacttgagtcacttcaacacttccgctgatcgcgctgtttcactttgtgtcctttttgtccttgcttcaatggtctggactcgacttgcgcgtggatgcaaacgagtggcggacaacgcattggagggcgaaactgcatgctaacacgttggacgagaccgacatttcagagccccgtgacctgtacctagacagcaacgacccccccctcagaacgccacgaacgctacgcgtagtcagcagaaaattttaatgcacgttggtgcgaggttatccatcgcgtgcctccacatcgtggtcaaccgccacaggtttcgacgctccatgcctacaaacgccaccgaagctgcctttcgtcatcggcccctttcaccgctcgtccccagcttgcagtgccggcaagggttacacagatcagtttgttccagtccgtcatcgacagctccagctccattcctcaacttgcgcgcccgatgccacatctcgatgttcttctccaagttgtcggccctcagctcgattcatagcttcgtgtctccattggacctttcaatgacagaggcccgtatgctcctcgtcttaaccaacgacctcgtccgccactgcaccgaaacaagcagcacggttctagttaccaagtgtggtcacgccgacgccagagcctggaaggagctgcgacgcagggacaacatccgcgtctacaaggagcgagcgcgctccagggccacgcccaccaccccgtccctgctgctgctcggcaccgtcaagggcaacctcgacgacgtcatgtacgccatggtgacccccaccgagcaggccatgaagatcaagtccaactgcacgcacgacggcgtgatcgaccgcaaggtgctgcacgagatcgtgcgccccagcgtggacgacccgttccgccacgtgagcgtcaactggtcgctgtacgccgactcggagccgcacgactacgtgtgcgtcgaggccacgggcgtcacgcacacgctgcgcggcgagcgcgtgggcttccacctgtcgcactcggtggcgttctcgcagctgccgagcttctccgagtcgcacggcgtggagcgcggtcaccggtcgatctgctcgctgtaccgcgagacgacggcgggcgaggtcgagtgctacgtgcgcggcttcttcgacttccgcgacggcgacaacgagctgctgaccaacatcgcgctgcacgcgatcgccaaccagtggctgtcgttctcccggcagatcgagttcgcgcacatgaagaagctcgtgtggcgtctgcgtcgcaacagcagcgacttggacgacttcgtcatggctgcggccgtggaagagcacaagcggaagatgtcggaggcggctctgaatcgagaagccacttgccgagtgtgtaacaagacgttcgggctcctggaccgtaaaaccacctgtaagagctgcgagcaggctgtgtgtcctcggtgccgagtcaagaagcgcgtgtgcgtgctcgctccggaccaacgtacggtgctggagaagagacgcagcttctgcgctccgtgcattgctgaagtcaccacgagcaacgcgcgggctattgcgcaggaggaacttcaggtccaggaggaagatcaaatgaaggaggcggaagagcaggtcgtctcgctctctagacaacgcacgacgtcgtggatggctaccagtgcctcctttcgatcgtgcatatagaaataggtaaaatgaaaaaccaagccgtgctaaagcacggagaagctctggattttatcatgtagttttgattctaggtttgattctaagttaatttatcttaaatgtgcctagcagttctacccgaggttctttggttaaagcgaagtatccttaaatttcagcagttggtgcttttgtctttattcgggtttgctaccaagttccgaaaccatgaaagcatgcactgccaactatctcaagcccttacgcgaacatgtactggtcactcgctatgccttagctatcttgcaatattatgcagccgaatcgtcaaggcttgaatgcggcggtaacggtacgtatgcacgtgcagaatggttgaaacgagaccaccatcgtttgaagacttcaacgacacccacgactttaaattgaagtcgtgggtgttcgtggggacttgaacgtggcgacaccgatgtaacatcgttgaacatacatgtactgcaaacacaactgcagttatgtttggagtcatggtcgagtcatggtcgagcgacatccgatcaatcgtgtcacgcgaatgtcgaccctaaaagactcaagcaacacgccgctggataatatattatccaagcgtttattaaagttaacgggtacgttccgatacgttaataattcgttcgtttataaccgatagcggagcatgcatttttatagtgatttgcacctgcagtcgtatcgccctaacaactctggataaaatccagagaataagcagttaaacgaggtgcttcgagggcccggacgagttaaaaagtgccgcaattgtttattttaactcaaaaactcactaggaccaagcggtatgtaccggttttttcagcgcttttagcccgaatttcaatcgtgtttcaaccgttgatacactgatcaaacaccgagcaatagtatagtactctccataacaattgtaatatttagtattaatgctttattactggtactactaatatttagaatgacaacgactattcgcagttcgaagaactgtcgattggggaaggtttttggatgacatcgaacgacattcacgctacattcgtcacttcaccccgatgacatcaaacaacattcacacaacatcataccgcactcgatcgaatcggtctgaatgacacttagaggttttgatgggtaacctccagttggggtcatatacggtacagatctgagattggatctgacgtgctaaaaggtgttctgggggttgcaccccgagaccccaaactaactccgagttgcggcaacggtgctcgtcgctgggcccgcctccgcaataccgcgcggccctgcttcgcgggcaccacgcgcgggtttgctatggctacgctcctcacagacgcacctggtggtacgtcttctccggaaaaagactaaaagctagctgcactagcttaggcgtttatctacgaagaatgggatgatttaagcttgtcttgtgtgagactacattgcgacccgcagagatccaccaaattggtggtgtagaatgatctactacttgatcctgttcttgtcaagacaagttcaaagtacattgttaccgatattagttaagatcatcctaatgccacacacttggacgaatcgaagctgacagtttttttgttgttagatcttcaggcgacccggacaaaatatgtgtgcggctgcaccatgttttatcgaacagagtttgaatgctcctacgttgtcgctgaacgccgcggattcctgtgcgagaggaagtcccgggcggacatcgtcaaagcgaatgacaaacacccggtgtatcctactcctacatgcgatcgaaatctgctagacctcagttttgactcatcaaacttgaaacaaattgctggcttcatcgggttatccagcaagttcggttgaacagttatccaggcagcgctaaatattcgattgcacgtttttttcttgttttatcgccatctgtaagtttccgagcacaacactgcaatctaagcaatacaggattctgcctgggcatcagcgcacatttcagtagcaggaaggaaggaaattacgttgattagctcgttgttgattactgttctatgctatgtgcaaagaactaaagttaaaactaaatccatggagtcctcatccgacgagcgggaggaggtagaatcaccacggttggtttgtcaagcccaagcgttgaagtatcaattcgttggagtgacgatacatgtatatgaactggcaatgcctttgaaaagaagcgatcaaacttggtacacttggttgtacagtggtagattaggcagatgctgcggctgcgaagcaggcgcaggggatgccatagtacatcgtctccctgtaagggtatccgtacacgctagcttcgaactgcgaaaccccccgggtccaccacccgggtccccaattaggctagtatttagacggacggcgatccttaggcacttcaacttgagtcacttcaacacttccgctgatcgcgctgtttcactttgtgtcctttttgtccttgcttcaatggtctggactcgacttgcgcgtggatgcaaacgagtggcggacaacgcattggagggcgaaactgcatgctaacacgttggacgagaccgacatttcagagccccgtgacctgtacctagacagcaacgacccccccctcagaacgccacgaacgctacgcgtagtcagcagaaaattttaatgcacgttggtgcgaggttatccatcgcgtgcctccacatcgtggtcaaccgccacaggtttcgacgctccatgcctacaaacgccaccgaagctgcctttcgtcatcggcccctttcaccgctcgtccccagcttgcagtgccggcaagggttacacagatcagtttgttccagtccgtcatcgacagctccagctccattcctcaacttgcgcgcccgatgccacatctcgatgttcttctccaagttgtcggccctcagctcgattcatagcttcgtgtctccattggacctttcaatgacagaggcccgtatgctcctcgtcttaaccaacgacctcgtccgccactgcaccgaaacaagcagcacggttctagttaccaagtgtggtcacgccgacgccagagcctggaaggagctgcgacgcagggacaacatccgcgtctacaaggagcgagcgcgctccagggccacgcccaccaccccgtccctgctgctgctcggcaccgtcaagggcaacctcgacgacgtcatgtacgccatggtgacccccaccgagcaggccatgaagatcaagtccaactgcacgcacgacggcgtgatcgaccgcaaggtgctgcacgagatcgtgcgccccagcgtggacgacccgttccgccacgtgagcgtcaactggtcgctgtacgccgactcggagccgcacgactacgtgtgcgtcgaggccacgggcgtcacgcacacgctgcgcggcgagcgcgtgggcttccacctgtcgcactcggtggcgttctcgcagctgccgagcttctccgagtcgcacggcgtggagcgcggtcaccggtcgatctgctcgctgtaccgcgagacgacggcgggcgaggtcgagtgctacgtgcgcggcttcttcgacttccgcgacggcgacaacgagctgctgaccaacatcgcgctgcacgcgatcgccaaccagtggctgtcgttctcccggcagatcgagttcgcgcacatgaagaagctcgtgtggcgtctgcgtcgcgatcgaagcgactcggatggcttcaacaaccaaaaccatgcaatacgagacgaaacctgctgcgtctgcttcaagtcgttcgggttcctggggcggaagacgtcgtgtgccagttgcgtacgagcggtgtgtcctcggtgccgcgtcaagaaattactgtgtaccgagacgtccgatgggcgaatagtgaccgaaaagaaggtcgcgttctgcaaaacatgcctgcgtgagagcttatcgagcagcgcccgcgtgatagcgcaccaggagctgcagttgattgaagacaaagctcttgtccagtcccgaagcgagctgatgaagctggcacggaagcgaacgccctcctggatcgccaccacttcctcgtttcgggtgcttcgtatgtgaactacacacttggtagttgatcagttgaataaccacgcaaacttgaacgtgtagtcgttgcctgcaacaccacagaagagcagttagactagtacttcgtcaatgcgaatcaatgcacaaggcctagcaaccgtaccgtagtgctccagcgttccctggacattgtacattatccagaacatgaggtgaacttgcaccccctgcatttgtttttccaagacgaagcccaactggtggagtggtgctaagcccagcgtgaatttcagtttatacattagcaagagcagcgaggcgagctggagcaagccgttcagcagcacgttcttgagcgtttggtacagttgagcgcgacccatcccgtaaaagacggtgtagtattcctgattgggcatatggtacgttgcaaccaagtaaaatgctgctcaacatacagtcagttcaccgcgagtatcactgcaagctcatattatataccaggacaacacgtacaatacacaagcggaatgatgacctcgacgtagttaacaagcaggaggaactcagccatgtagagtagtcgccggaccttgatcgtgtagctgcgagcagtaaaggcgcttggttgtcgaagcaaaatcgtatcacctccataaaaaataggcccaactcggtttcgacaaaataattgtgttaacccgtgaagtcgggtgagctaagacgtccaacgtggtttcttgtctgagcaaaatcctcaccaactttttgcaatcccgctgatgaaatatgagaagccgcatgcgcagccaccagcgtgaggtccctcggagcaacatctttccgacttatcaatatatttgctcgttccagagttgttggcatacgatttcgtgaattcgtttggccaatcgcgccacgttggctaccccatagacactcccggtcgagtagacgttcaatattcacaagctccgtacgtgcaacgctcagatcgcggatagatagccccatcagcaaggtgtcggcaatcataatcgccagtgtcgtctgaaacgagggcgatagctgcatgcagcacgatacgaacagcgagccaaagacgtcggcgttgaacacgacgatttctggcgtctcgtcgccaaggtgatgaacagctcgcgcgaagacatttcgcatgagcagcttcaaagctggtagaagcagtataaaccacatctgagcctgacgagacaaagctttgaaagtcacaaagtacgggatgtagactgcggccaccagtacatcacagcaccagattttgagcatatccacgagcattttggtcgcccccggggtgtcccgaaacaaatttctccattgaataaataagcagagcgagatcagcatggtccacgggggcatcatatgctgaatcgagaacggagttggaaacccgatagctagagcaaaaccgtactcgatcccacaactccccgctgccacaagcactgcatcccggatcactcgcttggttcagtacgggagtattgggactccaaggcgaaattggtggaagcaaaggagtgcacacgtcaaagtaacggagtataaacgcacgtagaacaacttgtttgaatggacgccagccgatgggtcggggagcgggatgatatcgacaagcagcgtcgggatcaggctcagcactggtgttagcaccgctagtgagacagagcgcgccgggtttgtagtacgtgtgaacttcgccagctcctggactcgcttcggggagtagataccgtgcaacttcacctgcgtagacttgtacagcttgacaagcttgctacatcgtggcattatcaatccgcacttcggtgagtagtgagttataagttcttggataagtatggttcatttgtggacgcaaaaatagtttgaagtttgcttactgatcttcacagtgccgctcactacagatacgtattagtcgtgcttcgtccatcaacgttgtgtagatattccattgccaaaattaactttgaatttggacatgggtttcctacttactccatcagactctcgcaaaagcattttggttttgctaagcttaccttctgagatgtcacacgatggtacacaacggtgcggatgaacaacagagtgagacttgggtgttttgggtgttgccacgctcgttcagagacgacttagctggaactatttgccctgacatctgcttctaggctgcttcctgacaagtttcttcattttaatgaagaaatttaatgtatcgcaaaatgattgttacatgtcgatgtgatcctcggacgtgcagtcattttggtaacctaacgctcacaaaaggccccaagcctcgtgccaacactttattcacgaacttctcatcctttttgtgctggcgttatgcttcatcgtcgtataaccacgcaaacttaaacgtgtaatcattatcttcaacacacacaagttaattagagcgattcgtggtcatcacgaatcaatacatgaccaaaccaaccgtagtgcgccaacgaaccctgcacattgtacattatccagaagatgcgatgaacttgcacccactggatctgcttttccaggacaaagcccaggtggtggacaggtgacagtctcaatgtgatgctcattctatacataagcaaaaggagcgaggcgaactggagcgcgcaatacaacagcacattcttgagcgtttgtgcacgatccatcccgcgaaaaacagagtaatattcctggtttggcatgtgataagttgcaaccaagtaaaatgctacaccgttaaaaaacgtggcaccgtaagtaataaaaaaacaatatcttcgactgccagttcacgcgatacgtacagtacacaagcggaattatgacctcaacgtagttcatgagtaggatgaactcagtcatataaagcagccgccgcaccttggccgtgtagctttgagcagttagaacgctcggttgtcgaaggaaaattgggccaccttcgtaaaactggaggcgaacgcggttccgacataatagttgtttcatcttgtgaagtgctggcaagtcgcgtgaactaggacctttggcgtgattttccctttggtcatggccttcatcaatttgtcgtgatcccgttgatgaaacttgaggaatcgcatgtggcttcagagcaaactctttccgaccaagcagcatgctagcgcgctccaaagttgtagacaaatgagcctgcctattagcgtggtcaggacgactactcactatactctcctggtccaatactccgaagttccctgcacgcaacacttaaatcatgaatagacagcgccatcaacaaggtgtccgcgaccataataaaaaaaaccgggtcgttctcgaccacaaagatcgccgtcacctccataagagagcgtagcactgcgacgtagctgaaaacccaattcacttcacttgtgtttacttcaaggcaatcgattgctgctgctcctcggcgcagcttaaatacaatcaaaactattcgctcactcggacatcgaccaccagtccgagtcgcgggtgtagactcgaagatgaacctcgtctcgcgcgacgtccagggcgttctcactgaggacgtcctggatgcacgggccgcagactggcagcttcttctcgaggatggctgtgttctcccagggtctcacagtgcacacggtcctcttcacctggcacttcgagcacaccagttggccgcacactctgcaggctttcttgcccgagccgagcagtccaaagctcttggtacagataccgcagtggcttgaagctttggctgccgctgagctcttccgtctttgcgccagtgtcatggagtcgaagctgctcccgctggagctgcacgagctgcacgtgtcgatgctgatgcgtgccgacttcttacgcagacgccacaccagcttcttcatctcagcgcactcgatcagctgcgagaaggacagccactggttggccatcgagttcatcgagatggcggagagcacggtgtcgtcctcctggaagtcgaagaagccgtgcacgtagcactcgacgctgttgggcgcgcgttggcgatacaatgcacagacggacaagttgcctcgctccacgtcggcgttctgaaagggaggcaattgcggaaacccgacggagtgtgcgatgtggtagccgatggactcgccctcggtcgtgatcgcaacacccgatgcctcgacgcaaatgtagtcgcggtgttcaggcacggaatacagtcgccacgccacgttcacgtgctgatacgggtcctccaccgtcggacgcaccacctcgtgcagcaccttggcgtctacgatgccatcctgcacgaacttggacttgactttgatgtcctcgtcgcaagaagctgagaccgcgtacataacgtcgttcagcgtgcctttaatggtgccgaacagcagcaacgagggcaccgtcggttcaagggcatcggggtctttgctcttcttgctgcgttgagtgtacacccggatggagtctttgcggcgcagctcgcgccattcgcgaggcgtcttgccagtcttgcgaacccgctccgagacgtggaggtactcgtcgatgttgctcagcacgaagttctccgccaagttctggagctcgatctcctcagtgtcgttgagtttcaagggtggcaaggcgtcgacgagtgagtggacggacttcatgctctgctcttcgtccgacggaatcgcaaatgatcccagtcgcagcagcagcaggttcgtcgaccagaacaagtcggtgggatataagtccagcttgaggcgttcggcgcgaggccttctccttaggccaatcgtcgacgctagcgccggcaaagtccagaacgcgtgatggctccgaccaatggagcgccacgcgtgacaagcgagctgctcatcagtcgagagcagcaggtgctcgagccaagttgaagcgagaagatcgctgagctttttgacacggacggacggagtcacgtgcattcctgtttctctttggggctatggtactagtgctggactactcactcacacgacgacggccagcaaacaaattgtcctcgaggttgcgttgcctccgaggggttcagttcatacagcttgtagtgcgcaggtctcgtcaatgtgcggcgtgtcttcgtcgtcctgtggctgccgctcgtgcagctctcggatctcgtcctgggcgatggccagcgcgtcgctcttggccacttggcaaacgcacgcggcgcagaacgtgcgcttcttgtccagcactgtgcgacggtcgggcgccagcacacacacgagcttcttgacgctgcagctggagcacacgccgcgctggcagatcttgcacgtccgacgcagcgagaagcccaagctgcgtctgcagacagcgcacccactgccactaccagcttcactcttgtcgatttgctgctgcgcggtctcctctaccggctcgatgaccatgggcccgttgactgggaggcccgagttcttgcgcaagcgccacacgagcttcttcatctctgcgcagtcgacgtaccgtgagacgctgagccattgcgtggccaccgcgttgatcgacaggctgttcatgagctcgttgctgtcgctgcggaagtcgtagaagccgcgcgcgtagcactcgacgagctcgggcgccttttggcggaacaggcagcacaccgacatgttggcgcgctcgacgccgaacttgtcgaagctcgggatctgcgagaacgccaccgagtgcgagatgctgaagccgatttgctcgcccttgctgctcgtggcaaagcccgtggcgtccacgcacacgaagtcgcgcgcgttgttgtgcaggcgccacttgacgccgacgtgtcggaacggctgctcctcgctcggagccacgacggactgcaccactttgctctcgagcacgccgtcctgcagacacttggacgtgagcttcatctgctcgtcggtcgcggccgccgccacgaacatgacgtcctcgagcttgcccacgaccgcgccgagcagcagaagcgacgggatgcagggcagcgcggggccggatgcagtagagtgcgtcgccgaccgctccttgtacacgcggatgccgtccttgcggcgcagctccttccattggtgggcgtccgcgtggccgtccgccgtcacctgcagcgcgttgaagctctccatgttgtggaccaccagcgtgtcggtcagctctcggagcgacgtcacgtccgactcgcccagctgcagctgcggcacgtaggccgccaagtcctgcgatcgcattgcgatggagtgaatacctagatgttcttgcgctctcgtgtccaatcccggaatgaagccctctggtagcggagaccgtcattgcgcgcgtcccgccacgcacttcaagctcctcgagccatcgtaaaagttcgaaatcagaaagagtaatttttggaaaggcaaaagtacactatctatcagatttacacgttttgttgacactgtagtatactaagatcggacgatctgttgtgttttatgaacactcttatgcatactttcatgaaagtttttcgacctgaattatgtcccgatgacaggtcatgtcttagcgacctgaacggcatcgctcttcactctccacgcgtttagactagtctggtagtctgagctggtcgtggaatccgggcgccttaacccagtcgcccccccatgtagtgcatcaaaacttttgattcaaaagtcgcggccagatatcggatgatccgagccccttggcgtcgtttcaattttcgaacgcgaacttgaacaggaacgactcactttcggtgcggcgtcggagcagcgtgcgcaccgaaaagcgttaggcatgattctgagagcgccagcagcatgttgcgctggcctaatcgagtcgagttcattgctgcaggaccctcaggtcggaatctacatgtactagccgcattttgatgcgaggtccgtggccgcgctgatgttccagagcgggaaaatgcgtgcgaggtggagcaccactccttgtttttccaaatacgagaacgatctcaatcctgctttcgcaaaaagctatcgtagttttggtaaagatgcgggctttgagcagaagagaactgtaggttcggaccggcaagcagtccgtccttctccaacatgcacaggcctggtcgtacatctaacattgctctttccttgattgcgcagctctcgaggtcgctctgtaatggtgaatgccgtacttacacaacgtggtccgtcagaagtaggccgccatctgcttgtcagcgttcaggatctcctcacgcgccacgcacacagcgtcgatccgcacgacgtcgttgatgcattgtgcgcagaacacacgcttcttctcgatcacggtcacctggtcggcggcaagcgccgccaccgtcttcaccacggagcaccgcgaacagacctgctcgttgcaagccttgcagaccttgcggcttgtgccgagaaacccgaagctcttggagcaaaccttgcacaatcccggagtgggtggcgccattggtagcttcgatttgccctcctcgctcgttagcgacatgatagattcgcggttgttcttcttgtgcatcgtccagagcagcttcttcgtctccgcgaccaggcgcgggaaggacatccactgagctgcaatggttgcgagggtagcgttgttgatactatcattcttacccaggtcgaagaacccgcgcgcgtagattttaaccgtcgacggcgtgttctgcacgtacagcgagcacagcgacatgttgcagcgcgggacgtcgcaactggagaagcgcgggacttgatcgaacccgatcgagtgcgttaggtggtatccgatccgctcccccttggcggatgtggcgatgccggtcgagtcgaggaagacgtggtcccggaactccggctcaccaaacatacaccacttgacgctgatgtggtggaaggggtcgtccatagtaggcctcgccacattgtggagtagcttacagtccacgatgccgtcttcgataagtgccgacttgattcgcatcgcttcggtggaaggagcgactacggcgtacatgaggtcttccagcgtaccaaccacagtccccagtagcatgagtgaaggcatctccaacggctcgcgcttggtagccctcttcttaaagaccctcgtgttttctctcttgcgaacccccttccagcggttcttgttcactggtgcaccagtcttcccgagatctaggctggcgtattgctcgatgttgtgcaggaccaaggtctccgctagctcgcaaaggttggtgttgtcttgctccgtgcattccaatggcttgagcaagtgcgaaaacttttgcgtcggcatgcatgggcgtattttatcttcgagttggtgatctctctgctgtcggtccttttgggttgtgtggtatgatctaccttcgacgagtctcgtcttagctgcttcagccctacagttcgtgccaatgcagtgctgctgaagcaaacaccaaccaatacgtccagttgagttgtcttcacgttgcgctcgatagcacccaaagctgaggtttggctggttccgtggcgagtctttcgtggtggtggaaatcggactggcgagaaggcgagccaagcgtttcccatcgagacgatgcggcactacgctcgcattgaggccgtcgtcttggtctccgctgaatgcggcggtccagcggtctattgattcggcccggaccccgccgcccacagctcgagcggggcacggaagacgctatactccctggcatagtttccgctagcaacaccaacgtacggcgcgtcacctctttactgcccgtgaggcacactgtcgagatgtccactagcctcacaatggctcgaaggtcggaccaagctcatgaagtagcaaactggcgctgctgcggtactgcagtcgaggacattgatctcggtttcttgataccgtttctgtgagcccatacagcgaaggctatcatgaacgcggcagtacagaggttgggatggtcgtgctatcatggcacctttgaagcctacgcttacagcaaacgcatccccggacatggcttacacatcgcgacgcggcgtatgcaacataggaccaagctgaaggtaacttgacgacactgaacttcgcaccagcggaaccagttctacaagtgacttgggttttgtatgccttacgttgaagttgacagtcacttgaagtttgacaatcatttattgtattcactcgactcgatctcagataaacgagtaaaatggtagcgacgaaggcctaaagatgtcgcttggatacatttcctgctcctcggcaaagttcacgaactgctccatgtcgttcatgctctgctggaactgccgaatgggctctgccagcactgtctcgctcgcgaagggctcctcctcgtagaaatgcaaggccgacgcgtttacaggcacctccctactgaaccacgagtagagatacgccatcttgggcacagtctcgctctgcacggcgtagtcgagtgggttgacctccacacctttctgggtcggcagaggcttgttgtagagcgctggggcgtggaagggaggcgcgatgctgtgccacgacgccaggccgttcatgaagtggtgcttgatagcgttctggaagataaaatgcgtcaggactcgtaccaaatcatcggcgttagagaacgatgaaggaaaatcgtgaatgtgctcgagacaggagcttcgttcagcccacgtctgtagctcggaatcacctcgaatcgcctcgtcgtcggcatagtatgctcgcacgtacttccttacaaacgtcttgaccgcatcgtagtacttggttccgtagcgattgaggcgataatcgggtaagaattccatctcacgggcagccaagtccgttgggaggtcgagcgcaatggaggttgtctcgaattcgcgcatcacggctcgtaacgatccagtagcgccgtagcccgtgacttggtcgtacggagtgccggggcttagcagctctcgtctggcgaagtactccattccgaaatctgcgaagaagtgatagtccagcaacgcgtagatcgggtgttcagtcgctagacttcgcatcatttcaacttgaacggggaccgagaccaggtgcgtctcgacaaagtgccgcatctgctggaaattgacctccgtggcgtggaatgccatctttgcaagttgccactcacccggtgagtccgccttcgtatacgtcagctctgagttaacaagcgtgatcgcaagtgggaggagctgccgcgtcttgacgttgttgcagaaaaacccgatggtattggggatgtacttgctgtccttggcagcttcgtcggtgagctcgccgtagtccgacaggtcggcgacaaagagcttgtggttgctcagagtacttgccaacgtcggctctccgcatacgtcttgaaacagaggaaacgggatgtcccacagatactccgcgtactcaccgccgtgcaccaatttcaagttgttgccgagaatgctgagccgcatggcgccgaagttctcgtcactcgagtcgagtgccaacggcgctggcatcatcccagtgtgggctaaatccttgtacgcttgatggaaatcctccgcatccccaaacggaagccgttcctccaggaaagtctgaaccttggacgcgttgaagttggttgtcgctgtaagagccgtagcctgctttaccaggtgctcgaagtacagcatccactcggtggaaacctccggccccgggttcaacacgaacgtttggtctcctaccgagtacgttcggttgacgttgcggatgagcatggagctggcttggacgatggacgcgcggtggccatcttcaggatctgggatgcccaatgcacttgtgctgagcagcaaagcgctgaagatggcagcaaccttcaggagagcagtcttcatcttggacgggagaagtcttgtccagtcgacggcaaaatgcaaaatgagcctttgcattgagtgcctcaggagagaccaggagcgttgtcaccgtacgtgcaaggaccttcacggtgtggattcttggcttcaagccacgtacgtggaggtcgtttctgaagacccgcactctcagcgagtggttgctgcactccatgcaggcaactatcatgcaacgtatctccccaaccgcgtagttatgacagaagggcccctcgcaagcttgggttgccttgaagaccatcaatcccttcctgcagacattcaaaatccaacatgttgaatcgtggtacgaatcctctgtaaggacgtgcgtacgctgagcaggtctggacaatgcgtactggggccattacgtagtcctaccaaagtcccacagacagcagagacacggtgcatacagtactaatatccgtcatacgaaaaagaaatcccagcatggagtgttgagaccatactggtagtgagatgttagctacggatttccagcttcagaaaagatctgcactttcttccttacctcctcgcctaccggaatatcaaatgatacactctcgagctaactcgccgataaagacttatttaatccttgtgcgcgctggtgatgtagttgagcagatcaatccgcgtggcgagacccgcaatcttgccgtcagttgaagtcacgacagcgaaatagtccttgtcaaagatcgtggcgagctccgctagcgagctttcgtgggtcacgcggctgaagtttccgaaggtcacagccgccacggggtccgcgcggctcacgcgaccagaagacagcatggacagcaggttgccgatggtcaccacaccctgcaccgtgccgttttctttcacgacgggaagctggtcgtagccgtgacgctccatcgtttcaatggcggcagcgcacgagagatgtggcgccaccgtcgacgggtgcggcagctccagcacagacacaggctgcgccgaccaccaggtgcccgtttccttgcggtacttggagtagttctcgcgcgtgtgcaccgtgttctccacaaacttgttctcgtacatccacgcgtcgttcaggaacttgctcatgtagttgcgcgtcgagtccggcaggataacaacgcaacgctggccagccttcagagttgaagcagcgcgcacagcggccgccatggcagagccactcgatccaccgcacagcagtccctcctcgcggatcaggcgacgggacatgatgaacgactcctggtcgttcgtcttctcccacttgtcgaccaggttgcggtcaagcacatccgggatgaaatcgtagccgatcccttcaaccttgtacgactggaggcggttcttgtcgttcagggattcgggctgagccagaatcgatccctccgggtccacgcccacgacgatcacatcagggcacttctccttgagcttcttggcgataccggagatggtgccgccagtgccgacgcccataaccaccatgtcgaccttgccgtcacactggtccaggatctcttcggcagtgccttcgtagtgagccagcgggttcgatgggttggcgtactggtcgaggatgtgggcgttcgggagctcggcctgcagccgcttggcgatgccgatgtggctctcgggcgagtcccacgcagcctccgtcggcgtgcggatgatttccgcgcccagcgccttgaggacgttcaccttctccagactcatcttctctgcaacagcacaattgcaccaatatccatgtaaataacccccattcaaccactggcagcaccagcacagacaacggcagccttaccgggcagcgtgatgatgcagcggtagcccttgatcgccgacgcaagcgccaagccgatgcctagcacataaaggaacacacagcgtcagcccccccttttaagcagccaaacagcagcctaccacttcacgcaccagtgttgcccgacgtgggctcgatgagcgtgtcgcccggcttgatgcggcccgcggcctcggcgtcctccaccatgcgcttgccgatgcggtccttgacggagccgccggcgttgaagaactcgcacttggccaggagctcgcactgcagatgcgccttcttgccgatgctgttgacgcgcaccatgggcgtctggccgatcgccgcctggagaggagagcgcgaggacgatccaggtcagcggctagcggacaccatgccataatggctacatctcggcttctacgcggaattgggaggtaattccggtatgcacgcagaggggagatgcgaggctacgcaccatgatgtccggcaggatctccagcgccgcggggggcagggacgactcgagcgaagtggaggaagccatggctgcgcgtgtggagtcgaggttgaggtggtacgggggatgcgctgcaccgagaaggcggagtggtgtggcgaacacgaaacaccaccttcacttaaaacgatcttgtggcagtgtgagccactccaggaacgtgccagggctagggctttcatcttggcgtgtttgacctgtcaaatcggatggaattcgttggctgggcgctctttgcgccgtcggcgagaactccgatcctcgatgtacgtgtgccacacaggtcctccgtcaacgcaaaaacattcaaatctacctcaatacaatgcataaaccgcgcaactcgatcgggatccgagatgatggtgcagagcgcggccacccgcaatctgaggtctccattccgcgcgccgggacgagtgcgcattccgcatttggctccgtcccgaccaagcagcttcaaccccctccgccttcacacacactccgccaccatggttctcgtacgtgcgcgcgctctgccttctcgcctcctcagcggcagcctgtgacgctgccgctgtccgcgccgccttctcctcctgcgcagagcccagccactgacgccttttgccgtgttgcttcttctctacctctttacaggccggtaacgccacgatcgaggagcaggaccccgagatcttcaacctcattgaggccgagaagaaccgccagtggaagtgcctggagctcatcgcctcggagaacttcacgtcgcgcgccgtcatggactgcctgggctcgtgcctgaccaacaagtacgccgagggcctgccgaacgcgcgctactacggcggcaacgagatcatcgacaagatcgagatcctgtgccagcagcgcgcgctgcaggcctacgacctggacgccgagaagtggggcgtcaacgtgcagccgtactcgggctcgcccgccaacttcgccgtgtacacggctctgctgcgcccgcacgaccgcatcatgggcctggacctgcccagtggaggccacctgacccacggcttctacacgtactcgaaggccgagaacacgcgcaaggccgtgtccgctacgtccgtgtacttcgagtcgctgccctaccgtgtgagcgccgagaccggtctgattgactttgagaagctcgctgagcaggccgctctcttcaagcccgccctcattgtgtgcggtggcagcgcctacccgcgcgactgggactacgccgccttccgcaagatcgccgatgacaacggcgctctgctcatgtgcgacatggcccactacagcggcctggtcgccaccaaggagcacgccagccccttcgactactgcgacatcgtgaccaccacgacccacaagtcgctgcgtggcccccgtgccggtatgatcttcttccgccgcgacgagcgcaacttcgagccgcgcatcaaccaggccgtgttccccgctctccagggcggcccccacgagcaccagatcgccggtatcgctgctcagctgaaggaggtgcagaccccggagttcaaggcctacgtgcagcagctcaaggctaacgccaagatccttgccaagacccttacggacctgggctactccatgtgcacgggcggcaccgacaaccacctgatcctgtgggacctgcgcccgcagaaggtcacgggctccaagctcgagaagctgtgcgacctggtgtgcatcacgctcaacaagaacgccgtgctcggcgaccgcagcgccctgaccccgggtggtgtgcgtgtcggcacgcccgctctgacgagccgtggcttcaaggaggctgaattcgtcaaggtcgctgagttcctcgaccgcgccgtgaagctgtgcgttgagatccaggccacgagcggcaagaagctggtggacttcgtcaaggccgctgaggcccacgaaggcgtgaagcagctccgtcgcgacgtgaacgcgctggccacgtccttcgagatgcccggctttaaggtgtcggagatgcgcaacaagacgattgaggaataagcgcctcgtatagatcgcttttccactgcctatagattgtgtgcggtgtcaaattcgggagctgcaagcaaacaaagcaccttccgccactgacatagtaatgcatgtcgtgtgatctaatccaacccacaaaacaaaccccactcaatatattcagccgcagtcgatggcttcaaccaaacactacaatcctagctgtacgctgtccgtcgagcaacttgttcaaatgtcagccgctgacccagtaccgtcgaatgtttccattgtctccatcgttgttcggcgagtcgaagagtacgaggagcggtgacccaggagttcctcgcggaggatgagcgcggcgtcgcttttggctccctccgcaatgcactgcgcgcagaagacgagcttcttgtcgttcaccttgctcttgttgtgcgacgacaccacgcacacctgcttcttgacgcagcagcgcttgcagacccactcggcgcagcaggcacaagctcgcggcgtcgtgcgcatgaacccaccaaaaccacgattgcaaacgcggcaccgagtccccgcctgtaccttaggccgagagtgctgccggatgcccgcgatgccaccggatgacgtcgagctggagctctggctgctgctggcgaacgagtctcgacccgttcggatccgcatccaccacacgagcttcttcatctgcgcgcactcgacgtagcgagccatcgacagccactgcgtcgaaatggtgtgcagcgagatgttgttgagcatctcgttgttcgagtggaagtcgaagtacccgcgcgtgtagcactcgacgagtgtagatgtcttttgtcggaagaatgtgcacacggacatgttggctcgctcgacgccgtagttgcggtagacggggagttgcgcgaagtcgagcgagtgaacgaggtggaaaccaacaagctcgccagagtcgttgggcagcagccccgtggcctcgatgcacgtgtagtcgcgcggctcggacagcgagtagtagcgccacgtgacgttaagcgcgtggaacgggtcgtccgacgacgggctctcgacgcagcatagcaccttgctgttgaccacgccgtcctgcacaaatttggagcgcgctcgcatggaatccgtgctggtggcgatcgacgcgtacatgacgtcattcaggctgcctgctacggtaccaagcatcaacagcgacgggatgcccgactgctctgggtgagcgatccccgctctcatacacgtagcgctgttcccgctgggcattgagttctggggttgaaactccttgaacacgcgcactccttccttgcgctgcatctctctccatgtccgcgagtcggggaagccgtccctcgttagacgcagctccttctgctgggccaggttcgtctcgagcaagctcacagacaactccaagatcgccttcatgtccagactcgacaagtgcagccgcagcagcgactgcgccatcaggtcgtccttggacatggtggtgctcagctgtggctccggaatggttgctcgctcgctagaagacttaatttcgtgtgccggagcgtcggatcttgagacgccctacggagtatggagcacgccgtgaaaaccacaatgccacaagccaagttagcgactggttaaatgattcattcacctccatcgctcggcgttacggagccacagaactgccgaaccggcgacgacagacagattccgggaaggagtgtgtcaggtcggaggacgccatgacatgcaggcgccctggagacgtttgcacggcctattacacccacctctcgccacaaacttgacgccacagcgtgaccgctcggctcaaaacgaacaagtctcccgcctgtcgctcctgcgtgtgcgctcttgagtcgtaagctggcgaggaattcctctacctgcgaacgaaagcaattcagcgaatgcagtcgcctggacgacgcgcagtgaagacgctcgttgcaaactgcataaaagactcgaatgagtgcagcggcgcgactcataccgggcgagatacttttgctagacgctcgccacagtggcgtcggcttgacctgcccgctcgcctcttctccggccagtcttattcgcgctagccacgtgagacttgcctcagacgcatctggctacgcgtcctgcgcctcattcgtttgcaatgcgatgctgcgggcacgcgcgtgtacagctctgctctgctccgctccgctggacggaagcgcctacagacaacgaacgacttacaaagccggcagacacaaaaagccggcagacgaagtcaagcaaagcttaacatgagcaaaccagccaatcagattcaatcaaatgacttcatctttgtataccatctggtttagtgtactttatatgctttcttgtgtactttatgcaacacgccgtgtgttttatgacagttttacagatttgacgggagggaatgtatcgttgtttttatataggaggatatgccggctttgtaagtcgttgtctgtaatgcagttcaaaaagtgacaggcaaaaagtatcctgactcgaatcgagtcggaacgtggaccacatacgaatttcaagatgtacaaaccctttcaatctcgatagttgtagtgaactattgcaataaagaagttaggtagagcatgatacgtgtatttttcatatcgccctaatgctcgctttgatcgcgtgtggcaagatgcatcgttgttgcttgtgccagtcacgtcggcagcgcctggcaccaatgctcaatgctcgcaatcaccgtgcttttcttgagctacctgggagagaaacgacgagtcaggtgcaatggtatctgcgcacctggcgtttcatcagtagcggcgtgtaaaccaccagtcgagcgcgagccacctacaagacaggcaacgaagtcgctgccggtcgtgcgggtggttcgtctaggctgtcctccagtcttccaatatgcacgtgaggaggcggcacaacgtcgtccgcgcctaagcgcgccgatagcggagaccgaaggtgggttcgcataggcgaggtaggaacattacgacaatgcaagtgctcgggtacagatactcgttgatgcttacgttcaacttgcgcgctctccaccgaattctctctgcagattggtgaagagaacgagattagcctcgtacaccccatgcgtttgggtcgctaaaatcgctgagaaaacaaatacttcactttgtaagtatctacggcggaaatgcacactactcgcgcccatacccacatacaccgatcatagacggaagacctgtattccttcacgccggcgcttcaaggcgagcaccacacgacttggagctgatgatgatcaccagcaatgcggcggcactttcatactgcgcagatttcctcttgatctgcaggcccagcgacgatagtctcaagggtagtgctctttcttccgaggagtggtgcaattggcggctttttcgacgcttgacatcgaggttcaaagctaccaactgtgctgggcttgtgcggccgcgacaaagtcgtctcgtgccaccgcgccggcctcgctcctcatcgcatcggccacacactgcttgcagaagtttttcttgcgttcccgtacacactgccgagtgcgagaaaacagcaccaaagtctccttcacgctgcagcgggagcacacatcatcgtcgcaggcttgacaaatacgtcgagatgctccgagaaaccgaaagctcttacagcacagcttacaccgggacgccggaaccctagccggctcaggcggtgcgggtagtaacacaaccgagttacttgagctcgacgtagaacttgacatggttggattgtacgggttgctgctgtagtgtccaaagccgccgtctccactgtcgctctcactcccgtccgaagatatggctcccttaccgcagttcagcagccgagcgagcttcatactttgagcgtacgccacgagcttggcgcacgaaacccattgcgacgcgatcgcgtgcagtgagatggagttgagcatggcgttggtcgtgtcgaactcgtagaatcctctcgcgtagcactcgaccagcgacgcggttctctgacggaagatccagcagacggacatgttggcgcgagcaatgcctttgtggtcgaagtttggcagtgtatcgaagccgacggagtggatgaggtggtaagcaacctgctctccatgcgtagtgtgcccccaaccagcgacatccaagcacacgtagtctcggggctcggacagcgcgaagtatctccaagtcacattgaggaagtgcatcgggtctgccatcgtaggctccacaatacgcgctagcaccttgcagtcgacagctccgtcatcgatgaacttggatttggtcaacatcgcctcggtagtcgaggctgctgacgcgtacagcaagtcgtcgaggttgcccttgatcgtgcccatgagcagcagcgacggtggcaccttggccgtcttggctgagccgtttcctgttgctgcttgggacctgagctgctgttgctgttggcgcgagctttccttgtagacccgcacaccctctcgcttctggatcggcacccaggaacgcgagtccggatgaccgtctgaagtcaccgccagcccgctatactggtcgaggttctgctgcaaaagggtccctgccagctcctgcatcatcttttcatcgtggcgctccagctccaacgtcggcatcgtgatgccgttcttggggggagacatgctgtctgagctcggaattgttcccacgtgctagtgctgggttcgacaatgaaacccaacgtcaaagtggtttgaaatgcgttctctcgactgtcacgcggcgatttagcaagtgagcagttcctggctggtccgaagcccagatttgaaggccaaatacgccacaaaaacgtcgtcgcgggttgaagcgactgaagcctgtccgggcagcgaaactggaacgaaagcggcacgacggcgtcgccttttagttggtaatcgcccagcaccttcgtctggatcgccatccctcgtgccgcgcgccaaccatctgcatcgttggaagtcaagtgggtagtatgacgactaggtcgccgtgactcgccgtaatactcaggcaagtcgccaccaaaacgcttgcgctctcgctggaacgcgagcatgtgagtgccctgctttcagtttcgtcgggtcgacagccggctgaggggaaccgcctgcgcactcaggagacccactacttcctgcttgctcttagtatggagagcagcgtgagtcaagcgcagcactggcaaaacctacctttagaggcgagaagtcatgcccgatcctttggcggagcgcctaagccatcatgcttcactccagaagttgctggaccgacagtgaattcctagtgtagcgctaaggtcgagtttgaagcacggcactgctgtggcgggtgcccagcgttcatattattagtttgaggcgggcactaatgatcgacacgatcacgacgcgaagacgctgacttcggtatgctctgatacagtatctacaccatgaggcctgcagcgtagccacttcatgccataatcttaggtgctagaccacgcgttacttgtgttgcagtgcacctgctgtcaggaaagtcccccaacgtaggtaacctatgagaaggtcagcactcaagtgctgagtgctggggctcaaagtgaggttagctggatatgtgggctaagtgttgcgcgaatcccccttcagtattgctacgaacagtttacgcttagtaaatttggcgagctaaagataaaggcacgtgcgcttcaacgcatggacgaagtcctattcgtgtcaggtaagagcacgaatctgtgccaagctacagttgggatgcccttgcttcgagttatctttggccctctgctctgttcgtagctagaggttcaatcgtcaactggttctccggcgtgaagctcagcgcgggacaagaggctggattattacaaccccaaggacgaacacagctagcgatggccatcactcaagatgatatggactcgctggctcgaacgctcttcatccccgtaatgctcgtgctcgactcggccatgttccagtacctcgtgatggtgtactactcgaggagagaggaaacccgcgtccgacttcttctgttggcgtcgttcctcggattcgcgactcaagtttactcgcacgaaagcatggaaatggctttggagctcaacgatatctaggagacgagcctgcagctgacgttcctcgcccagatttctctcatcggccgcgctgtctgcaccaaggtcaaagtccggggaatttactggttcacgtgcatctcagaggtgctggttgcgttgtgttggcttgacgtggtgtgcacaaccttagaagtcgcggatgtcatccaaggagacctgtttcatttgtgcgggaacgtgctcgagtccttctcgctcctcttcgtgctcgcctttcgcttctactatctatcactgacgaacggctttcgctcggtgctgctggagcgcaagctcgacatctcactttacgtgatttttgtgcttcatgagttcccgttcatcgtccttgagcacaaaaccggcatctcgtgggaatttgcgcagggaattttcaaccggatcatgatcgtcgcctgcatcctgcaaaacctccggcagaaggcgctcccaagcagtggcaacagcagcagcgccaagggcaagacgtatgccattggctccatccctactcgaatcgcatcgttgaagtcccaaggctccattatcagaaatgctcttgtctcgaaaacgggctcgttccggtagtaccaagcgccactagaaatctccagaattgcggtatcttccagcatgaagatagaaagcttggggccatctgcaagcatgattgagcctgcaggtaacgtcgagacattcgagtgaataaaatactggctgatatccaccataatcgacaaagttcgggtcagacagagatcagtgaaagtagcttcgacttgacgacacgcgcgccaagccgtgtgccaaatagcgcgctcgaaatgccagctcaagtgcactgtgaggctctgggaaaacatagccaccctcgaatagaagttgccaatctacggtccgtgcatccaggacgtcctcagggacaacgtactaggcgtcgcgcgagacgaggtacatctacggtcgatgagcgaatagttttaactgtattgctgctgataagcagcagcaatcaattatctcgaagtggatgcaagtgaagcaaattcttttttttagctacgtcgcagtgctatgctctcttatggaggtgacagcgatctttgtggttgagaatgacccgggttttaccgaagtcgacttcagagctggtgtgtgggtcgttggtgctgccagttgcttctgcactggagcaggcgcatagcgcttgcttctcacggtggagttcttgttgctgcttttgctgctgcttctgcttgaaatcgccttatgacggatattctgcacgatgcacgccacgacgaacacacggttgccaattccctgggcgaactcccacgtgactccagtgtagtattcaagcatcatgaacgggaactcgtgaatgaccagtagcacgtacagaaacatctcgaattttcgctcttcaagcacagtcttgagcccgtgggtgagtgacaagtagtaaaagcgaaacactatgacgaagatgagcgacgtcgactcgagcacgttcccaatcaagctgaggacgtcgccctttatcacgtcggagacttccaggattgtccagcacaaccagcgcatccgcagtgtacgtgaagtagaagatggagcgaagcttgacctttttgcagacagcgcgaccgatgagagtgatctgagtgacgaacgttaattgcaaactcgtctcggagatgtcgttgagctccagggccatctcgcggttgtcgtgcgagtaaacctgcgtcacaaaccccaaaagagcagccaacagcagggagcgcacgcggaactcttttcttctggagtagtagactgccacaagattctggaacacccacacgtctaacaccagcatgacggggatgaacaccgaccgggatatagcgtccatgccatcttgcgtgattgccatgactcgctattgagttgcttagtacactggaaaacgatggtttttttgacacgaactgctaaagcgaggggtgaaagtgaaaatgagcagactaagttggttcgcaccagaacactcttatcgtcattgcacacctagaatagctgtgccgaacaagtccctagaatttaaaaaagatcagttattgcacgatgacattaggaattggacagttttcagcaggtaaacaacacaaacgataaattaaaaatgcaattgagatcgcgtttttaatttgtaccgacaaggacttaaaactcctcactccaacggacttctcgactaactcacgcaagaaaacattacacggtacagtaaggttgtcagattttacaagtagacgcaggtaaaaccgtacggcctactttccgaagcgaatccacgaggtggtgatattcatgcataacaaaaactccgtgcgcttgctgcactagcggtggatttacgctgtttgttgaaatttccctgcttgctgaacatttgtcgtgttggcctagaacgctcggttgtcgaaagaaaatcgagccaccttgataaaaatcgggaccaattgtagttgatgcgatgcttggcgtcagattttttttcacacctttagtattagttttgcacacatacatcatcagacaactacagtagtacgatttcgcgcgttcaggaattgaagccacttggtgagctcagggattcgttcaaagtcactttacttccgctatcttggtacgtgtaaatccgaacgtaataactaccatttagattattgcgcagcaagaaatagagtctaacatttgggaaactcggtggacggtctgttaccgcatattcgtggggcataccttcttcagtatgtttttttcttcataaatatcaatattatacatagtttatgttaggaggttctgcgtaggtatctaatcggtattatacgttaaatatgctacttttgcattatccagaatttgtggatttcctttcagcaaagaaacgacggaatacatggctagaaacttatcggctttgatttacttagtaaatactactacaatcgaaaatagaaagcaaaagaccagtatattatgtgcaattatatgaaaatgccactgttaagtgaaattgagcatgaaatatcaacgttaaagcgcgttcttggcctgtttgcgcttgtgcttgggcttgggtcctggtttaaatccgcgcttgccgatgcgtgctggttcagctaggagctcggggatgcgcaaggtcgagcctacattgagcgtcacatccgtggccatggacggaatgcgaacgtgtacgtctctcgaaaatgttcaatggacatgcgtttggcgtcgtagagatcattgacccgcttaccgtcttagatggccgcgcaaattgcgtggatgcacggaaaagcttcatcttgccatccgccacatgtacactccgattcaggcaaattcacgagtcgccatgtgtggatgtgactttggcgcgtgcgtgggccagatgctgcaccgaataagcgcccttcatcagaggaatcttcgcgcacatgttggctgccgtagtcctgtccttcagttgtttctgcaggattggatccaactctgtccccgctttggatgccgcccagttcgccgccatttgcctcttgtcagaagtgagctcgcttagcttcatgaagtacatgttgaacgcgtcgagtggcttggcgctgcgcagctcagtgcccaaccagttgttggcttgctcagacaagttggacgtaatctcgttgaaagtcgggaggccgaaggcttcacggaacttgtacttgacccagtgtttgtgatcgacgttgtccatgtactccgccgccttggggtttgacgctgccagttcggtgaagaagagcttgtagtcattttcacagtcgctacgagcaagttgacaggttaggcgcctgtcttcgtttgttagcttcgccccagtgcaatgcgcgttgtccatcaggtgccgaaggcaaaaacgatgtccagcctacggaaacaccgcggcgacagctgcgaggagccctttttggcggtcggataaagctgtgaagcggtcgatcttcgtagcaaacttgacacaatccatgaaccagtaccagtgctcgtagttctcagtcgggaccaaggcgaacgcgaaagggatcacgtgattgttgtagtcttttgtcgtggcgaccagaaaaacgctccgcttgttcatctccccctagagatgagcagcgtcgaaacccggccattgggaggatgtgaatcccaacatttgggataaacacggcacgctcaaatgtcacgtcgtccttagcgcgatcgagacgccaaactgatccggggttttggtcgaaaaccagctccaggtaggatcccaacttctggtaactttcaacgaggtcaccgtggagcctatcgtcaatatccagccgaattctggaaattgcgcttttagccaggtgaaatccccttgatatgaggaaattcttgatagccttgcccgtgagcgtgtcgatggatcggttgtgagctggtaacatctctttcatcacaaggagagtcaaccgctcaatttcttgggtcgtgttacgctaagccctagccgggcgcgcaatcgagccttcgacacacggtgcttgagtgaagccaacgtgtttggcgtggttgtgggcaaagttagcccgcgtaattttccatttcctgtccagcccgaagacattgatgaaaaacggacactgcagcttgtccaccggagtctcgctgtcgaaaacctggacaccgttcaggtttttacactggtacttggcgttccccgagttgtttggcttcacactgctttgcttcactataagatgaaacccgcatttgatggcgaactctttgcacgtggatcggagggccttctgtgtcgaaaacgcttccgttgcgatgttgtcttggcggtcgtacgcgaacccgaaatctggacgtgccaaatcttcacagtgaacatggacgtcttcacgtagcaatcctagctcccgtgcggcatggaggtcggagtcgtcgacctggaaacgcgccttgccaaacttgctggatggatatgctgccggcgccgccatttcgaaaattaggccgcaagaagagagatactcgactagcccgtggaaattttcatgtaactatccgttgggtggtttcacgtgtctactaaccgagaataattcacctatttgaaatataacagtatcttagtgaaaaattattttgcaattgtcttgggtttccatataatgttagtattggtatacgttcagcaaaatatgtatggcaatctgtatggtagcagtttttcacttttacatgaaaatttgaaattgaacgagccgtgaatttgttattataaaattcagccgttatatctcccccaccgccaaaccgtaaattcacccatctcataaactgctatatgtggtatatgcgatgctgcgcaagatgggatcggccaaacggccatgttggttacaaaactgcctatttgaaaatatacgcacttagtgatgcactgattcgctgtacaggcgaacttacgcggcattcgttaaatattgtactgacccgcacaacaagtcaagtaattagtttgtctattcggacaactcagtacatatgtactgagctgtggaaattcctccactacactactgtcgtaacaggagtctctgctgttgccctcaccaccgctttggtggcagctcctgcttctgctgctggcacaaacagcagcgcctcccacgctccgttcggaaccatcacgtccaagcctggcgagtgtgtcatcggcaacccaaacaccgggtttgggacaaccgcatgaaggcggaggtggacccctacgacaactggatcatggaccacatcgtggccaacaagggcaccgtcaactactgcgtccgctgagacagcaagaccaccaagcttaccagggagatcgcggctaagctccagccaatgttggcttgtcaacacgccgcgtggaaccgctggctcattggctacaactgctggccgtacaaccagatcaaggtcaacattgtcggctgggctgcgagagaggcctcggacctggagtggtcggacgagtcgctcggcaagatctacatcggcgacctcgacaaggacggatctccccagtgaccaaagaattgttaccgttccgcggaaggatttggtggctcgccggagcctagcggctgcgatgagaagcgttcgacgtctcgctgtggcctacgcaggattatggtggcggcttgggaacgtacaatttccagcaggtggacctcgacgacatgcttgcgcacctcgacgacaaggagctcgagatcgtgtcgcacgagatggaccacggcttcggactgccggacttttacgaggagcccaaacccgacaacttcccgcccaccctcatagacgccttcacctcgtccaccgtccgcgacacggacggctggatgctgcgcctcgtgctcgagaacaagaagtccaagtacgacttctgagtgtcgacccaggacacaaaacactagagtttccgtcgcttgtcgctgataaaaaacacctaaattgatgttcgttatcactagtaattcgccttaacgtccccaacagcaaagaattttttttagttttttggcaaccttatagtgaattgacatgtgaggaacttgttgaagtgtttgttgctactttaaggtcatgttgcaacttgggggtaggcggtgtcggttgagtcaacagtccacattaacctcgaagatgcgggtgccgagcgctcggcggttcgtgacggcgctgtgcgtgctgctgctgatgggcagaggcgcccagaagctgcgcctgttcgtcacctctgcgctggccaaattccgcgccctcaccgccgctggggcgcccgcgacgccgtcttggaggctgttcagcgccttcctgggcgacttgagggaccaccgcgtcgggaaagtgctgctggcgggtgatcactgcatcgtacaagctaaggatggagcggatacatacaagtaagtgaaggcgcgttgatccacggtggtttggcggctgtatgagccgtagcacaggagatatggtggatattagtttagacattccatggtataaattataacattctttggtgtatcatgtgacctgtagggtgctggtgccgccgaggaccgagaacacgtacatcctggacgctctagtgcggtcgggggttgagtttggctccgtgacgccgtcgacgaccagcagattggtgccaattgctatagcgctgatgccatttctgtacctgggcctgacctacaaaatgctgcggggcatatacggcacggacgctggaggtgtaggcaaggacggcaccaagaaggtgcgcaagcagcagcaggtgatgcggatctccttcgacgatgtggcgggtattgacggcgccaggaaggagctggaggaggttgtggacttcttgagacacccggccaggtaccaggccattggcgccaaagtgcccaaaggagtgatgctctgcggtccatcgggcaccggcaagacgctgctggctagagctgttgcatctgaagcgggggtggccttcttgttctgctcagcgtcggatttcgtcgagatgctggtgggtcgaggcgctgcgagagtgcgggacctcttcacgcaggcctcgcagtacccgcagtgtatcatctttattgacgaaatcgatgcgttggctaaagctcgcggtggattcaactccaacgatgaacgggagcagacgctgaaccagttgctgacagagatggatggctttgagggaaacgtcaatggagttatcgtcattgccgctacgaaccgcccggaggtgcttgatccggcattgtgtcgccccggtcgctttgaccgtcatgtgtatgtgggtctaccagatgccaagggaagagaggcgattctggaggttcactgccgcaatgtgcgcttggacagcgaggtcgacctgtcagtcattgcggaggagtgcggccagttgggccagcgttcgggggctcagctagcaagtcttgtgaatgaagcggcgttgctcgccgtgcgccatggagacacaagcatcaagcacgcgcactttgaactggccatgaaccgcgctttcgagtcgcagacccgcaacattgcaggatcgtcgtttgagttcacgatggaggaagtgtcgtagaagcacacaatatgatggaagtccaatgcttgaattcttgtggataacgggtggtaagaaaaaaatatttgtgagtgaacattagcggcaacgaatcacacattcctggactgaagaaaacatcaattgatttgtgaactacaacagcaactctagctacgtgcttctttctcgcacgatccagatcccccgaagacgcttagaagtcgtacttgtgcttcttgttctcgagcacgcggcgaatcatccagccgtccgtgtccttcatcgtcatcgacgacagcgcccacatgacgcagggcttgaagttgggcggctggggcatctcgtagaagtttggcagtccgaagctgtggccggtttcgtggatggcgaagtaaaactgctcttcctccatgtgctccagcacaatttcgaggccgtactgctggaagtcgtatttgcccagcccactcgtcataccctccgtgggccacaccgagatgtcgaacggctcgccttcacagccgctggactctgaccagccaccagacccgtccggcgtgcggtagcagttctgcgggcactgcgggactccgttttggtcgaggtcgccgatgtagatcttgcccagcgagtcgtccgaccactcgaagtcggacgctttgcgaccagcccagccaacgatgttgaccttgatctcgtcgtacggccagcagtcgtagccgatgagccagtggttccacgcggcgtactgacggttcagcatcgtctcgattttcttcgcgttctccttggtgagcgagatggtctggctgtcccaacggacgcaatagttgagcgtgcccttgttggccacgatgtggtccatggcccagttgtccaaggactccacgtccgacttcatgcggttgtcccaaatccactggaggtccttggggctgatgtaggtgttcgggtcgccgacgacgcactcaccaggcttggacttgatggttccgaacggagcgtgggcagcggtgctgtttttgccggcagcagcagtgggagccgccaccagggcagtggcgaaagcaacagcagcgacgcttgaaaggagacttgggggcatcgtggataaatggagaatgaggtcacgctggtagacgggattccgtggccagggtgttgcctgtgcgcttacagtaggtaagtacagtaacatgattgtacaggtatttaagtcgcaaaggcgatagttgacgctcacgaaaacgatactaaacatttttgtaacttacttttttaccaggtggtgatggtactcgtggtgctgggggcacctttgctgttcgagcagagctgtcgcgcttcgtgaatgcagatgggtagatcagcagaatggcattgccacgtgatgataatagccatgtacatgaagtgcttactttgtactgtagttattctggaatgcaagctactgtactgtactatactactttgtatcaatacagcgtagcacgtctacttacagtacttcgacaacttgatagctttcagctcatgatgtcagacactttgacgccacatcgctgactcactgcttcgcctttgaaggtccctaccactatacatgtaatacaacttgtagtgcaatacaagtcacgttatacatgtgcaagggttatcgtttcgaagacacattaattgatcnnnnnnnnnnnnnnnnnnnnnnnnnnnnnnnnnnnnnnnnnnnnnnnnnnnnnnnnnnnnnnnnnnnnnnnnnnnnnnnnnnnnnnnnnnnnnnnnnnnnnnnnnnnnnnnnnnnnnnnnnnnnnnnnnnnnnnnnnnnnnnnnnnnnnnnnnnnnnnnnnnnnnnnnnnnnnnnnnnnnnnnnnnnnnnnnnnnnnnnnnnnnnnnnnnnnnnnnnnnnnnnnnnnnnnnnnnnnnnnnnnnnnnnnnnnnnnnnnnnnnnnnnnnnnnnnnnnnnnnnnnnnnnnnnnnnnnnnnnnnnnnnnnnnnnnnnnnnnnnnnnnnnnnnnnnnnnnnnnnnnnnnnnnnnnnnnnnnnnnnnnnnnnnnnnnnnnnnnnnnnnnnnnnnnnnnnnnnnnnnnnnnnnnnnnnnnnnnnnnnnnnnnnnnnnnnnnnnnnnnnnnnnnnnnnnnnnnnnnnnnnnnnnnnnnnnnnnnnnnnnnnnnnnnnnnnnnnnnnnnnnnnnnnnnnnnnnnnnnnnnnnnnnnnnnnnnnnnnnnnnnnnnnnnnnnnnnnnnnnnnnnnnnnnnnnnnnnnnnnnnnnnnnnnnnnnnnnnnnnnnnnnnnnnnnnnnnnnnnnnnnnnnnnnnnnnnnnnnnnnnnnnnnnnnnnnnnnnnnnnnnnnnnnnnnnnnnnnnnnnnnnnnnnnnnnnnnnnnnnnnnnnnnnnnnnnnnnnnnnnnnnnnnnnnnnnnnnnnnnnnnnnnnnnnnnnnnnnnnnnnnnnnnnnnnnnnnnnnnnnnnnnnnnnnnnnnnnnnnnnnnnnnnnnnnnnnnnnnnnnnnnnnnnnnnnnnnnnnnnnnnnnnnnnnnnnnnnnnnnnnnnnnnnnnnnnnnnnnnnnnnnnnnnnnnnnnnnnnnnnnnnnnnnnnnnnnnnnnnnnnnnnnnnnnnnnnnnnnnnnnnnnnnnnnnnnnnnnnnnnnnnnnnnnnnnnnnnnnnnnnnnnnnnnnnnnnnnnnnnnnnnnnnnnnnnnnnnnnnnnnnnnnnnnnnnnnnnnnnnnnnnnnnnnnnnnnnnnnnnnnnnnnnnnnnnnnnnnnnnnnnnnnnnnnnnnnnnnnnnnnnnnnnnnnnnnnnnnnnnnnnnnnnnnnnnnnnnnnnnnnnnnnnnnnnnnnnnnnnnnnnnnnnnnnnnnnnnnnnnnnnnnnnnnnnnnnnnnnnnnnnnnnnnnnnnnnnnnnnnnnnnnnnnnnnnnnnnnnnnnnnnnnnnnnnnnnnnnnnnnnnnnnnnnnnnnnnnnnnnnnnnnnnnnnnnnnnnnnnnnnnnnnnnnnnnnnnnnnnnnnnnnnnnnnnnnnnnnnnnnnnnnnnnnnnnnnnnnnnnnnnnnnnnnnnnnnnnnnnnnnnnnnnnnnnnnnnnnnnnnnnnnnnnnnnnnnnnnnnnnnnnnnnnnnnnnnnnnnnnnnnnnnnnnnnnnnnnnnnnnnnnnnnnnnnnnnnnnnnnnnnnnnnnnnnnnnnnnnnnnnnnnnnnnnnnnnnnnnnnnnnnnnnnnnnnnnnnnnnnnnnnnnnnnnnnnnnnnnnnnnnnnnnnnnnnnnnnnnnnnnnnnnnnnnnnnnnnnnnnnnnnnnnnnnnnnnnnnnnnnnnnnnnnnnnnnnnnnnnnnnnnnnnnnnnnnnnnnnnnnnnnnnnnnnnnnnnnnnnnnnnnnnnnnnnnnnnnnnnnnnnnnnnnnnnnnnnnnnnnnnnnnnnnnnnnnnnnnnnnnnnnnnnnnnnnnnnnnnnnnnnnnnnnnnnnnnnnnnnnnnnnnnnnnnnnnnnnnnnnnnnnnnnnnnnnnnnnnnnnnnnnnnnnnnnnnnnnnnnnnnnnnnnnnnnnnnnnnnnnnnnnnnnnnnnnnnnnnnnnnnnnnnnnnnnnnnnnnnnnnnnnnnnnnnnnnnnnnnnnnnnnnnnnnnnnnnnnnnnnnnnnnnnnnnnnnnnnnnnnnnnnnnnnnnnnnnnnnnnnnnnnnnnnnnnnnnnnnnnnnnnnnnnnnnnnnnnnnnnnnnnnnnnnnnnnnnnnnnnnnnnnnnnnnnnnnnnnnnnnnnnnnnnnnnnnnnnnnnnnnnnnnnnnnnnnnnnnnnnnnnnnnnnnnnnnnnnnnnnnnnnnnnnnnnnnnnnnnnnnnnnnnnnnnnnnnnnnnnnnnnnnnnnnnnnnnnnnnnnnnnnnnnnnnnnnnnnnnnnnnnnnnnnnnnnnnnnnnnnnnnnnnnnnnnnnnnnnnnnnnnnnnnnnnnnnnnnnnnnnnnnnnnnnnnnnnnnnnnnnnnnnnnnnnnnnnnnnnnnnnnnnnnnnnnnnnnnnnnnnnnnnnnnnnnnnnnnnnnnnnnnnnnnnnnnnnnnnnnnnnnnnnnnnnnnnnnnnnnnnnnnnnnnnnnnnnnnnnnnnnnnnnnnnnnnnnnnnnnnnnnnnnnnnnnnnnnnnnnnnnnnnnnnnnnnnnnnnnnnnnnnnnnnnnnnnnnnnnnnnnnnnnnnnnnnnnnnnnnnnnnnnnnnnnnnnnnnnnnnnnnnnnnnnnnnnnnnnnnnnnnnnnnnnnnnnnnnnnnnnnnnnnnnnnnnnnnnnnnnnnnnnnnnnnnnnnnnnnnnnnnnnnnnnnnnnnnnnnnnnnnnnnnnnnnnnnnnnnnnnnnnnnnnnnnnnnnnnnnnnnnnnnnnnnnnnnnnnnnnnnnnnnnnnnnnnnnnnnnnnnnnnnnnnnnnnnnnnnnnnnnnnnnnnnnnnnnnnnnnnnnnnnnnnnnnnnnnnnnnnnnnnnnnnnnnnnnnnnnnnnnnnnnnnnnnnnnnnnnnnnnnnnnnnnnnnnnnnnnnnnnnnnnnnnnnnnnnnnnnnnnnnnnnnnnnnnnnnnnnnnnnnnnnnnnnnnnnnnnnnnnnnnnnnnnnnnnnnnnnnnnnnnnnnnnnnnnnnnnnnnnnnnnnnnnnnnnnnnnnnnnnnnnnnnnnnnnnnnnnnnnnnnnnnnnnnnnnnnnnnnnnnnnnnnnnnnnnnnnnnnnnnnnnnnnnnnnnnnnnnnnnnnnnnnnnnnnnnnnnnnnnnnnnnnnnnnnnnnnnnnnnnnnnnnnnnnnnnnnnnnnnnnnnnnnnnnnnnnnnnnnnnnnnnnnnnnnnnnnnnnnnnnnnnnnnnnnnnnnnnnnnnnnnnnnnnnnnnnnnnnnnnnnnnnnnnnnnnnnnnnnnnnnnnnnnnnnnnnnnnnnnnnnnnnnnnnnnnnnnnnnnnnnnnnnnnnnnnnnnnnnnnnnnnnnnnnnnnnnnnnnnnnnnnnnnnnnnnnnnnnnnnnnnnnnnnnnnnnnnnnnnnnnnnnnnnnnnnnnnnnnnnnnnnnnnnnnnnnnnnnnnnnnnnnnnnnnnnnnnnnnnnnnnnnnnnnnnnnnnnnnnnnnnnnnnnnnnnnnnnnnnnnnnnnnnnnnnnnnnnnnnnnnnnnnnnnnnnnnnnnnnnnnnnnnnnnnnnnnnnnnnnnnnnnnnnnnnnnnnnnnnnnnnnnnnnnnnnnnnnnnnnnnnnnnnnnnnnnnnnnnnnnnnnnnnnnnnnnnnnnnnnnnnnnnnnnnnnnnnnnnnnnnnnnnnnnnnnnnnnnnnnnnnnnnnnnnnnnnnnnnnnnnnnnnnnnnnnnnnnnnnnnnnnnnnnnnnnnnnnnnnnnnnnnnnnnnnnnnnnnnnnnnnnnnnnnnnnnnnnnnnnnnnnnnnnnnnnnnnnnnnnnnnnnnnnnnnnnnnnnnnnnnnnnnnnnnnnnnnnnnnnnnnnnnnnnnnnnnnnnnnnnnnnnnnnnnnnnnnnnnnnnnnnnnnnnnnnnnnnnnnnnnnnnnnnnnnnnnnnnnnnnnnnnnnnnnnnnnnnnnnnnnnnnnnnnnnnnnnnnnnnnnnnnnnnnnnnnnnnnnnnnnnnnnnnnnnnnnnnnnnnnnnnnnnnnnnnnnnnnnnnnnnnnnnnnnnnnnnnnnnnnnnnnnnnnnnnnnnnnnnnnnnnnnnnnnnnnnnnnnnnnnnnnnnnnnnnnnnnnnnnnnnnnnnnnnnnnnnnnnnnnnnnnnnnnnnnnnnnnnnnnnnnnnnnnnnnnnnnnnnnnnnnnnnnnnnnnnnnnnnnnnnnnnnnnnnnnnnnnnnnnnnnnnnnnnnnnnnnnnnnnnnnnnnnnnnnnnnnnnnnnnnnnnnnnnnnnnnnnnnnnnnnnnnnnnnnnnnnnnnnnnnnnnnnnnnnnnnnnnnnnnnnnnnnnnnnnnnnnnnnnnnnnnnnnnnnnnnnnnnnnnnnnnnnnnnnnnnnnnnnnnnnnnnnnnnnnnnnnnnnnnnnnnnnnnnnnnnnnnnnnnnnnnnnnnnnnnnnnnnnnnnnnnnnnnnnnnnnnnnnnnnnnnnnnnnnnnnnnnnnnnnnnnnnnnnnnnnnnnnnnnnnnnnnnnnnnnnnnnnnnnnnnnnnnnnnnnnnnnnnnnnnnnnnnnnnnnnnnnnnnnnnnnnnnnnnnnnnnnnnnnnnnnnnnnnnnnnnnnnnnnnnnnnnnnnnnnnnnnnnnnnnnnnnnnnnnnnnnnnnnnnnnnnnnnnnnnnnnnnnnnnnnnnnnnnnnnnnnnnnnnnnnnnnnnnnnnnnnnnnnnnnnnnnnnnnnnnnnnnnnnnnnnnnnnnnnnnnnnnnnnnnnnnnnnnnnnnnnnnnnnnnnnnnnnnnnnnnnnnnnnnnnnnnnnnnnnnnnnnnnnnnnnnnnnnnnnnnnnnnnnnnnnnnnnnnnnnnnnnnnnnnnnnnnnnnnnnnnnnnnnnnnnnnnnnnnnnnnnnnnnnnnnnnnnnnnnnnnnnnnnnnnnnnnnnnnnnnnnnnnnnnnnnnnnnnnnnnnnnnnnnnnnnnnnnnnnnnnnnnnnnnnnnnnnnnnnnnnnnnnnnnnnnnnnnnnnnnnnnnnnnnnnnnnnnnnnnnnnnnnnnnnnnnnnnnnnnnnnnnnnnnnnnnnnnnnnnnnnnnnnnnnnnnnnnnnnnnnnnnnnnnnnnnnnnnnnnnnnnnnnnnnnnnnnnnnnnnnnnnnnnnnnnnnnnnnnnnnnnnnnnnnnnnnnnnnnnnnnnnnnnnnnnnnnnnnnnnnnnnnnnnnnnnnnnnnnnnnnnnnnnnnnnnnnnnnnnnnnnnnnnnnnnnnnnnnnnnnnnnnnnnnnnnnnnnnnnnnnnnnnnnnnnnnnnnnnnnnnnnnnnnnnnnnnnnnnnnnnnnnnnnnnnnnnnnnnnnnnnnnnnnnnnnnnnnnnnnnnnnnnnnnnnnnnnnnnnnnnnnnnnnnnnnnnnnnnnnnnnnnnnnnnnnnnnnnnnnnnnnnnnnnnnnnnnnnnnnnnnnnnnnnnnnnnnnnnnnnnnnnnnnnnnnnnnnnnnnnnnnnnnnnnnnnnnnnnnnnnnnnnnnnnnnnnnnnnnnnnnnnnnnnnnnnnnnnnnnnnnnnnnnnnnnnnnnnnnnnnnnnnnnnnnnnnnnnnnnnnnnnnnnnnnnnnnnnnnnnnnnnnnnnnnnnnnnnnnnnnnnnnnnnnnnnnnnnnnnnnnnnnnnnnnnnnnnnnnnnnnnnnnnnnnnnnnnnnnnnnnnnnnnnnnnnnnnnnnnnnnnnnnnnnnnnnnnnnnnnnnnnnnnnnnnnnnnnnnnnnnnnnnnnnnnnnnnnnnnnnnnnnnnnnnnnnnnnnnnnnnnnnnnnnnnnnnnnnnnnnnnnnnnnnnnnnnnnnnnnnnnnnnnnnnnnnnnnnnnnnnnnnnnnnnnnnnnnnnnnnnnnnnnnnnnnnnnnnnnnnnnnnnnnnnnnnnnnnnnnnnnnnnnnnnnnnnnnnnnnnnnnnnnnnnnnnnnnnnnnnnnnnnnnnnnnnnnnnnnnnnnnnnnnnnnnnnnnnnnnnnnnnnnnnnnnnnnnnnnnnnnnnnnnnnnnnnnnnnnnnnnnnnnnnnnnnnnnnnnnnnnnnnnnnnnnnnnnnnnnnnnnnnnnnnnnnnnnnnnnnnnnnnnnnnnnnnnnnnnnnnnnnnnnnnnnnnnnnnnnnnnnnnnnnnnnnnnnnnnnnnnnnnnnnnnnnnnnnnnnnnnnnnnnnnnnnnnnnnnnnnnnnnnnnnnnnnnnnnnnnnnnnnnnnnnnnnnnnnnnnnnnnnnnnnnnnnnnnnnnnnnnnnnnnnnnnnnnnnnnnnnnnnnnnnnnnnnnnnnnnnnnnnnnnnnnnnnnnnnnnnnnnnnnnnnnnnnnnnnnnnnnnnnnnnnnnnnnnnnnnnnnnnnnnnnnnnnnnnnnnnnnnnnnnnnnnnnnnnnnnnnnnnnnnnnnnnnnnnnnnnnnnnnnnnnnnnnnnnnnnnnnnnnnnnnnnnnnnnnnnnnnnnnnnnnnnnnnnnnnnnnnnnnnnnnnnnnnnnnnnnnnnnnnnnnnnnnnnnnnnnnnnnnnnnnnnnnnnnnnnnnnnnnnnnnnnnnnnnnnnnnnnnnnnnnnnnnnnnnnnnnnnnnnnnnnnnnnnnnnnnnnnnnnnnnnnnnnnnnnnnnnnnnnnnnnnnnnnnnnnnnnnnnnnnnnnnnnnnnnnnnnnnnnnnnnnnnnnnnnnnnnnnnnnnnnnnnnnnnnnnnnnnnnnnnnnnnnnnnnnnnnnnnnnnnnnnnnnnnnnnnnnnnnnnnnnnnnnnnnnnnnnnnnnnnnnnnnnnnnnnnnnnnnnnnnnnnnnnnnnnnnnnnnnnnnnnnnnnnnnnnnnnnnnnnnnnnnnnnnnnnnnnnnnnnnnnnnnnnnnnnnnnnnnnnnnnnnnnnnnnnnnnnnnnnnnnnnnnnnnnnnnnnnnnnnnnnnnnnnnnnnnnnnnnnnnnnnnnnnnnnnnnnnnnnnnnnnnnnnnnnnnnnnnnnnnnnnnnnnnnnnnnnnnnnnnnnnnnnnnnnnnnnnnnnnnnnnnnnnnnnnnnnnnnnnnnnnnnnnnnnnnnnnnnnnnnnnnnnnnnnnnnnnnnnnnnnnnnnnnnnnnnnnnnnnnnnnnnnnnnnnnnnnnnnnnnnnnnnnnnnnnnnnnnnnnnnnnnnnnnnnnnnnnnnnnnnnnnnnnnnnnnnnnnnnnnnnnnnnnnnnnnnnnnnnnnnnnnnnnnnnnnnnnnnnnnnnnnnnnnnnnnnnnnnnnnnnnnnnnnnnnnnnnnnnnnnnnnnnnnnnnnnnnnnnnnnnnnnnnnnnnnnnnnnnnnnnnnnnnnnnnnnnnnnnnnnnnnnnnnnnnnnnnnnnnnnnnnnnnnnnnnnnnnnnnnnnnnnnnnnnnnnnnnnnnnnnnnnnnnnnnnnnnnnnnnnnnnnnnnnnnnnnnnnnnnnnnnnnnnnnnnnnnnnnnnnnnnnnnnnnnnnnnnnnnnnnnnnnnnnnnnnnnnnnnnnnnnnnnnnnnnnnnnnnnnnnnnnnnnnnnnnnnnnnnnnnnnnnnnnnnnnnnnnnnnnnnnnnnnnnnnnnnnnnnnnnnnnnnnnnnnnnnnnnnnnnnnnnnnnnnnnnnnnnnnnnnnnnnnnnnnnnnnnnnnnnnnnnnnnnnnnnnnnnnnnnnnnnnnnnnnnnnnnnnnnnnnnnnnnnnnnnnnnnnnnnnnnnnnnnnnnnnnnnnnnnnnnnnnnnnnnnnnnnnnnnnnnnnnnnnnnnnnnnnnnnnnnnnnnnnnnnnnnnnnnnnnnnnnnnnnnnnnnnnnnnnnnnnnnnnnnnnnnnnnnnnnnnnnnnnnnnnnnnnnnnnnnnnnnnnnnnnnnnnnnnnnnnnnnnnnnnnnnnnnnnnnnnnnnnnnnnnnnnnnnnnnnnnnnnnnnnnnnnnnnnnnnnnnnnnnnnnnnnnnnnnnnnnnnnnnnnnnnnnnnnnnnnnnnnnnnnnnnnnnnnnnnnnnnnnnnnnnnnnnnnnnnnnnnnnnnnnnnnnnnnnnnnnnnnnnnnnnnnnnnnnnnnnnnnnnnnnnnnnnnnnnnnnnnnnnnnnnnnnnnnnnnnnnnnnnnnnnnnnnnnnnnnnnnnnnnnnnnnnnnnnnnnnnnnnnnnnnnnnnnnnnnnnnnnnnnnnnnnnnnnnnnnnnnnnnnnnnnnnnnnnnnnnnnnnnnnnnnnnnnnnnnnnnnnnnnnnnnnnnnnnnnnnnnnnnnnnnnnnnnnnnnnnnnnnnnnnnnnnnnnnnnnnnnnnnnnnnnnnnnnnnnnnnnnnnnnnnnnnnnnnnnnnnnnnnnnnnnnnnnnnnnnnnnnnnnnnnnnnnnnnnnnnnnnnnnnnnnnnnnnnnnnnnnnnnnnnnnnnnnnnnnnnnnnnnnnnnnnnnnnnnnnnnnnnnnnnnnnnnnnnnnnnnnnnnnnnnnnnnnnnnnnnnnnnnnnnnnnnnnnnnnnnnnnnnnnnnnnnnnnnnnnnnnnnnnnnnnnnnnnnnnnnnnnnnnnnnnnnnnnnnnnnnnnnnnnnnnnnnnnnnnnnnnnnnnnnnnnnnnnnnnnnnnnnnnnnnnnnnnnnnnnnnnnnnnnnnnnnnnnnnnnnnnnnnnnnnnnnnnnnnnnnnnnnnnnnnnnnnnnnnnnnnnnnnnnnnnnnnnnnnnnnnnnnnnnnnnnnnnnnnnnnnnnnnnnnnnnnnnnnnnnnnnnnnnnnnnnnnnnnnnnnnnnnnnnnnnnnnnnnnnnnnnnnnnnnnnnnnnnnnnnnnnnnnnnnnnnnnnnnnnnnnnnnnnnnnnnnnnnnnnnnnnnnnnnnnnnnnnnnnnnnnnnnnnnnnnnnnnnnnnnnnnnnnnnnnnnnnnnnnnnnnnnnnnnnnnnnnnnnnnnnnnnnnnnnnnnnnnnnnnnnnnnnnnnnnnnnnnnnnnnnnnnnnnnnnnnnnnnnnnnnnnnnnnnnnnnnnnnnnnnnnnnnnnnnnnnnnnnnnnnnnnnnnnnnnnnnnnnnnnnnnnnnnnnnnnnnnnnnnnnnnnnnnnnnnnnnnnnnnnnnnnnnnnnnnnnnnnnnnnnnnnnnnnnnnnnnnnnnnnnnnnnnnnnnnnnnnnnnnnnnnnnnnnnnnnnnnnnnnnnnnnnnnnnnnnnnnnnnnnnnnnnnnnnnnnnnnnnnnnnnnnnnnnnnnnnnnnnnnnnnnnnnnnnnnnnnnnnnnnnnnnnnnnnnnnnnnnnnnnnnnnnnnnnnnnnnnnnnnnnnnnnnnnnnnnnnnnnnnnnnnnnnnnnnnnnnnnnnnnnnnnnnnnnnnnnnnnnnnnnnnnnnnnnnnnnnnnnnnnnnnnnnnnnnnnnnnnnnnnnnnnnnnnnnnnnnnnnnnnnnnnnnnnnnnnnnnnnnnnnnnnnnnnnnnnnnnnnnnnnnnnnnnnnnnnnnnnnnnnnnnnnnnnnnnnnnnnnnnnnnnnnnnnnnnnnnnnnnnnnnnnnnnnnnnnnnnnnnnnnnnnnnnnnnnnnnnnnnnnnnnnnnnnnnnnnnnnnnnnnnnnnnnnnnnnnnnnnnnnnnnnnnnnnnnnnnnnnnnnnnnnnnnnnnnnnnnnnnnnnnnnnnnnnnnnnnnnnnnnnnnnnnnnnnnnnnnnnnnnnnnnnnnnnnnnnnnnnnnnnnnnnnnnnnnnnnnnnnnnnnnnnnnnnnnnnnnnnnnnnnnnnnnnnnnnnnnnnnnnnnnnnnnnnnnnnnnnnnnnnnnnnnnnnnnnnnnnnnnnnnnnnnnnnnnnnnnnnnnnnnnnnnnnnnnnnnnnnnnnnnnnnnnnnnnnnnnnnnnnnnnnnnnnnnnnnnnnnnnnnnnnnnnnnnnnnnnnnnnnnnnnnnnnnnnnnnnnnnnnnnnnnnnnnnnnnnnnnnnnnnnnnnnnnnnnnnnnnnnnnnnnnnnnnnnnnnnnnnnnnnnnnnnnnnnnnnnnnnnnnnnnnnnnnnnnnnnnnnnnnnnnnnnnnnnnnnnnnnnnnnnnnnnnnnnnnnnnnnnnnnnnnnnnnnnnnnnnnnnnnnnnnnnnnnnnnnnnnnnnnnnnnnnnnnnnnnnnnnnnnnnnnnnnnnnnnnnnnnnnnnnnnnnnnnnnnnnnnnnnnnnnnnnnnnnnnnnnnnnnnnnnnnnnnnnnnnnnnnnnnnnnnnnnnnnnnnnnnnnnnnnnnnnnnnnnnnnnnnnnnccgaccgaaaagaggggatgctgctgatgacggacacaatttggatcgtatgaagcagcggcaaagttcagtcttcatcgactcaacttatcgttgggtgcctgctccattctaccagttggagattgtgatgctctacgatttgatttcggagctctttttgccaatttggtacgtccttacgaccgggaaaacggctcaggtgtacgatcgcccgtttcacaacatttacgtcggggcaaggcagaaaatctttccagcgcatgttgtgtgcgacttcgagttcgccatgatcacgtctgtccagaaccagtttccagaatcccgaattgttggctgcctatttcactccaagcaagcgctccgtcggaagatgatgaagttgaagatcacggaagatgaagtggacttgaccatgcgggagggctgcattgaccgctgacggttatccgacctatggatataccctccgaggcgcccacgaggtccgatccatgatcaagcgcgactgccaagcgaggggtattggttactcctggtccaactggacagttggaagttctagaagtacttcaagaaaatctggatcaacaagttcaagccggagtggtggaacattaacagtgtgagcgaagacatcgtaaatcggaccaacaacccgcttgtacgctagcctacgctacttcctaagatgggccgagttatgcgttgtgggaggtcctggccttcttcgatgactttgaagaggtcgatgacacgtgagagtcgatgacgagcgagtgcattatctctgtcaactacattgacgtttgtatgacgcacgtcaattcacttcaacttgaagtggattgaccaatcagattgatttactctagcaccgcattgggcactgcccagacggccggccacagggctttttcgaaataaactcactttcgaattcgcatccaaccacctcaacggtttaggcatcgcggtcaacacttcctcgcggcctctgcgtctcctactgatcaagcctcacagataccatacagcattgctggtatcactcgggccttattaacaaggccgccatcaatttcttgacgagctaaatcatatcaatacattgctttttcctaaccaatcggattcaccttatactcttagagaccttatatatatatcaggtgtccggtattcacgcacattactgtacatgaaaatcgccaaggttgtcaaaacaagctctttttttgctgctgtacgccgcttggtcaactattttcacaattgtgccccactgaataaggctggtttaaccatacaaatctctgtactaaatttgcatccttaccgatgtggcaaatcatgttgcagaaactgatctgacatgtgagatgaccaccccgtctttatcgtccgcaactataatcaattgtcatgcccagcacctctggcctgctgagcaagcacgtcagagcgatgcggagcaaaggctcgggcttggttgctcgtgaccagaggctcgacacgcatgggattgctacccgagagggtcagcagtcacagcgaacatgcattaagtcaaaaagaaaagaaatcagaaacagtgaacaggcatttagtaggaaatacatgaaatcaacacaaagagacgaggacaaacacataggtaagagacacaacagaaataagcaaatatcgcgctgtgctcatctaggaccacagcgaggcatgcatgttaggctaaggattcattcgcaaatacacctcgtgtcccgcacttcgatctcaacaaccaagtctacacttcctggcccatcgaccaggactcttcaccttaaccacctacactccggagccaaacacgacatctggtagcacttgcggggggaaggctcgccgctgcacggcacttcaaggggaggcattttcagcttgcggtgtaagtgtcacgtcggcgtgaccaacccaactgttggggagacatctgtactttagtagggcaacctcttactgtacgctgaacgtgggaaagaactgctgggcagccgtggtgcaagtttgtctttcaactggccccggtaacagcccattagcccaagtagctactgttctaagaagactgcaccgcaactaagtcgagcactataagtctcgaagccggttagtcagtttttgatcttggtagcccggcacagcactaacttcgacttgctgtttctggcccggtagggctaggtgatgacgagagcacactccaaggtccacaaggacaagaaaacgaagctgattggttcgttcctgaggcttgcggttaacaacccacgcaaggcggacaaggctcggcaggacctctacaactcgatagcgaaatccgatcgtattctagaggctctgttaaagcaggtcaaaacgaacaagactgagcgtccggtggagaagaaggccatcatcaagctcattaaggcttcgcaaccagacgtccacaacgctttgtaccgcgtgtcagtgtccatttaccagcgtctccgcgagatcgagatcccagttcctgattgagccgaagaggagaccaaggacaagaagcgtcaccgctcgacctccatgtgcatgtttcttccttctcatgagtgaaggtgcctaagctagactcatgcttacgccctagtcttgcacttgaacggggcgggccgacgacgtgctcgtcacgtctcgatccttacatcctcccgggtttgacttcacgttgacggcgcttgaagtcgtcgacgagaactttccagttcgagacgtgtttgatgtctttctcgagttcccacgaatattcgtggtctggaagaccatgccacttgacaagccactcaatcttgcggttgaactggcgcttgcgtagcagttgctcgataatgtggaggtcttctccagtgtcttcatctgtgatgatgcgagatgctttcggaagaacacgagtctcaaccttgtccgggttggagacgtaatggctgagaacatctacgttgaaagtagggttcaacgacttcatactgcgtggcaaaatcaagacgggcagcgttgtcgctgatcatgcgcttgatcacgaacggaccaactttacgagccgctaactttgcacgtttgacgtcaatgtctttcgcagtatgcctgagtggaatacggcgtgtatcaagcataaccaaatctccttccttgaattggacgttgctacgacgttgatcgtagtacttcttttgcgatgcttgagccttgagtaggtgttctttggctttgccgataatcttgtcgcgttcatccttaaagcggtttgcatactcagacagtccttgttgtacttgaactgtggtatacagcgtaggaaatgttccgaagggattgcgttcgttacgtcctgtgtctacttcaaatggcgaaagtccggtagaagcactgactggcgtagcgtgagcatactcaatcgttcccaacttggcagcccagtcatcaccatgatacgagaccatgcaacggagtgcatcttctagtaccaggttttgacgttcggtttggccgtcagcttgagcgcagtatgccgttgtcatattcaactgtacacccatgatctgcgcgaaagagttccaaaaacgtgacgtgaatttgggatcacgatcactgatgatcactgcaggcactccatgatgccgaacgacattgtcgaagaagtaatgagcgatttcttcggcatcatcggtagtgtgaacgggacagtagattggacgcttggacaacttgtccacgacggtcatgatagcatcatagccgtcggattctggcaatccagtgacgaaatccatggagacgccttcccaacattccttaggaattggaatcggaattagcttgccattcttcttggcgttgctgtgcttccaacgtgtgcaggtttcacaactttgcacgtaatcggaaacgtcttcatgaagcgacacccagtagtaccattgcttgatacggagatacgtacgacgaattcctgggtgcgcggcaatactgaaatcatgaaattgctcgataatcttcgttcttagacgattgcgctgcgatctcgggacacaaagtttcatcactttggactccttgtcgtccgtgaattgcacataaagcaatccatccttgagtacgtatggatcgtgtggagaacgacacttgtctcgaaatccgggatcagtgtggtaggctttgatgaactcttgtttgagattcgaagtccatcctagcgaacttgcgtgttgcatttgcacaaccgatgtggcgatctctgcatcttgaacagggatgtggagataaccatcggaaagatcatgtatggcgaggtgaccagcagaagcatcagccatctcctctcccgaaaattcaacaggcgagagagccgaagacaccattatcgtattcaccttctgatgctgtcttgcacgatagcgtgatgcaaaactgtcacactgcggagtacacgtgtgaaagttgatcgtattgatagcgggacgcacaacactctatgaatctggaacagtcgagctttcactgtctgaagtcgacaacgaagcattaactgcgtgtagatcgcacactactcgaaaactcgatgtcgttttgtcatcgtctggctcgcaagagatggagccaatactggtgatggaaacgcattcggagttgagtccattggaggacgggacagtgcatcagctacgacattcatcgaccctttcaagtgatgaagtgtgaagtcgaactgagcaaagaaggtcaagaagcgtgcaagcttcgaagaaacattagggtggtgtaacaaccactgacatgcactgttgtcggtgtagatgtcgaaatgacgaccataaagataatgacgccatttttccaacgacagcttaattgcgtagagttccttctcgtgggtaggccaattttgttcatgcacacccaacttcttggagaggaaagttaacggatgatcatgttcgttgtgcttttgcgaaagcactccacccacgcaatatcctgaagcatcggttgtcacgatgaacagaggagagaaatccggtaaagccaagactggggcggattgtagtgctgttttcagtttgctgaaggcgatatcatgctcttcattccagttccaggtgttgtccttcttgatcagagatccaaacggtaaggcgattgtcgcgtagttgaaaatgaagcgacggtagtagcctgcgagacccaaaaacctttgtaattgcttttggttcatgggaactggccaattggcaatcacttcagtcttcttggaatccaccgcgatgccttggctcgacacggtgtgacctaggaactgaacttgattttgcccaaaatgacacttcgaacgatgacagtacagcttttccctgggtagcacttcgaaaagtatgcggagatgctgcagatgctccttcatgttcttggaaaatacacaaatgtcgtccaagtataccacgatcaacgcgtatttgcccaatagaagacgtgaccagacacctggcattccagcaagacccattggtgcaacacaccactggtaggtctcaaaatgagtgcggaacgctgtgtactgacgactcttcaaggcaaccctcatctgatggtaaccttgcgcgagatccaagactgagaagatgacgcatccatacatcttgtcaaatgtctcgtcaattctcgggagatgaattcaggcgatgatcgtctgcgaggtgagccaacgataatcaatcacccaacgaatcggtaacgtggcgtttcccgatcgtagccactcagctcgagagagttgtttccataatttcgggtccttcttcgggatactaaagatgttggagacccagggtgaatcggatagttcgatccaacctttcttcaacttttcctcgacaaacacgtggttcaaacatgtggctcccgtgtctagcataatggtgacacgtttgccctcacacagacctggcttccgaatcaactcattccggagctggtagtgactggattgtggcagcattgagatcatttatctcaacaacttcaaccgattctggcttctctgtggccaaagtgtgagcagcgaactgacatcgcttggtgtcagactgatagctgttgttcgatatgtgcttctgtcgattttaaagtttgaagcactgttcaatcgtatggccaagcttcttacaataccgacacttcttgtggttgccactgttgcgattgttgctttgaacagggcgacgataattgtcacggcgtggactatgcacatgaccggtgtcgatttccataagctcaggttcattgtcagcaggacgctgtgaagccgtgttggcacgagtgaatggtgaggagttggcacgtccaaaagtccttggatgtgtccaacgattcttgtaaaacggaccagcacgaaagtgcgatctgtcatactcgagtgcaactgagagagcctcagataccgtcgtgcaacgacgatactgaacttcttctttcgtggggctaacaagacctcgaatgaagtacgtgaccttgtcaagctcactcatgtccttgacttgcatgatagcaacgcggaatcgagagatgtagtcctctaagctagaacaacatttttgcttgagactgtacaatcgatctcgaaggcgctcctgaaggtccggaggaacgaattccttcgtgagcttctggatcaagtcttgggcgtcactgatggaatccctgcaaagcatgtaccatgcagcagcatttcccctgaaattggcggtcatcatggcaatactgcgcttactcagattctcatcttgccaatcaatgttcttcgcctcaaagtaatggacaacttggtcgaaatacaactcaaccgagtcgcccatgtttccatagaagcgaggtaggcttatgccctcaactttgacttccttgcgtggcgaagtcaaaacgtcgattagtgcttgttgcttctgcaccatttcaaccacatactgggtttgacggtcagcagaccatccgccaggattcaacgaagtcatgatagtgtaacttgagcgaaaagctgattaaagttacgctacgaatgcaagctactagctactagaactagagctacgacgacactgtcaacaactactcgaaacgcgcgcgcttgatgctgatgatgcgatcaacgaaggcacgaactttggtgtcgatgcggatgacacaggtgttcaagttgtcgacggtctcgtagagaaacagtccaaactcagtctcgatgacacggtcaaggtgagtctcgaaaaacggaaagaaaacttcacgggggtgatccgtcaagcaagtaacctcgtactgcaaacgggtagcagcacggatggtgaaagcgcgttgaacggcttgttcaatggtgagaatgcgacgatgttggtgatcttcttcccactcacgagcagtacgcttaggcatagactgggaaaatacccgaagcttacgccaaagcttaccagatactcgaaaattacgcgaacaattcaggaaacgctgaaaatcacgcggattctccaattcggaattacacgggtgctggggtttagggtaactactgattggctgagccaaagtgtaattgctctaaaacaatgcgaaaaagtacaaaaacttcacaaattaacacttaaacaacgctacttagcgctaattcaagcgttggcgcttggacttggaaatggctgttttctggctgacaccctgaataagtagctcttcctcttgagcttcttcaagtgctctttgacgcgagctctccttaagttcacggtcgaacacagtaatgagcgtatacgcactacttgtaaacttaggatgtggcaagcttctcgataaagtatacgctctgattcggagcgaaaactcccctcctgagcctgcaggtggtgagtcaagcttgcaaggcggtttactgcgagtaaccctttaaacgaagtcgatctactgcttgtagactaggttttgggtttggtttacctttttggttgttcaccttggtcattcaaggccaagtgaaacaaaggtttccgcaatatactaggctttcgtgcgtgaaggtgtctagtgaagtgaacagcgttaaactagtacactccttcggataactaaccgttagcgaaaagcgtaaggctagtttagcaaaaatcgactagcgaaaagcgttgatgtcgactatgcaagacttttacggctagcgaaaagcgttaatgccgctaagtcagagtgcacgtagagaagcagttaaagcgaaaaacgataaccctaacccggaggttgtagcagtagtcgaactgaagccgaagtagcgaggcgagtcggttggagctcttctgaccacttgcccggcgaaaattgaccgacttgtgctaccagatgtgaggcttgagcagtaggagacgcagaggccgcgaggaagtgttgaccgcgatgccgaaagcgttgaggtggttggatgcaaatcacacgaggcggtccccagaaaattgccgacaatgtgccgtcacctctgtgacctggagtttgtatcggatgctgattggtggatgacttggatacggcgcggctgtacccgtgtgacatggatggcgactgtgggagagaagtgatttctcgggatgaatccagcgtctgaccgcaggtgggcccaactggctggaagtgtgaatcctgggagtgcacgcccagaatttcagagaacactcagtccagccgcggactttcccttacgatgagtgcctaaagtctggcggaaagtgtctctggagaatgtatcccagagtacgcctcatcttgctgtggctcagagtgccccagaggatcaaattaccctgagaatcaacccactactaccatgatcaagcgcaggaggccgctaaacccactaaaagtgtggctttgaggagatacacacgagtctacactgcagcagacttgttacccagagtgccgcacggaaacctagagtgccgcacgatgacccagagttcatctccctgagtgcaggtgacccagagttccaaaaatgattctctgggtttggaccataaatccagactctctatactgaacttaagtgtttcccgagccaacacccaagaatccccacagttccccaagattcctcagaattcccaggatttcagaagatgaccctgagtgtcatctggttttcagggattcgagtcagttcgaagtcagtctgcaatcaaagtgatgcgtgaccttgaagaaccgttgtggatgcgcagactggatactttcgaggagtcgagagggagtcctgcaccatactaaaccaagtctaaggacccacaattggcacttccgacgccgtgcgacaatggattcgcaagccgatcgcaagtttggaccgctgaacccaaggtatactcaagacaagacatttgaccccaaacatagtaaacagaagatatttgcccgaagaagagagagagaaagagagagaagtagctgataaaaaccaaacagagttccttttaccctgtactgcgcaagtgacttcggccaagcctgccgacggaaatccggaggacccgagactacgaccgcgggacgctaagggcacatcaacggcgaaggacagccgtctgtgtgggctccatcaaactcaagtccagttaggtggtgaccagcgacggccttgagcttcctggggtgatccatctattccatatcctagttgggtcacttgctgtgctcgtggtagcccatttcatattattccagagggtattctggggtgctaggtagtgtgtgaagggaaggtaactgatagtgattgtattttcctcctttattggaggtggtgcgcgtttgtgtgagtctcaggggagctagacccctgaatttcagactcgagtgagcctagtgtgtatgtgacccaccgtccaagggtccaaaagaataagtgacggctagttgaagtgtttgtatactctgtatttgttggttttatcgagctaggagggcatttggctaaggtgtcttctgagttccatgtcccagaggtgactgaaatcctggaccctgaattcgtgatattctgggtttcgggggatctgattctctgggtttgccttttggtgtggaggtgcgttctgaagtagacgtgcgctcccgcacttcttcgaggctacattttcaaccggtggagtgccgttccgtcgaagacaaacgagccgacagggattacacaaggtacccacgccaaccaaggagtgtgattctcagggtttaaagctttgcggctgcgaatctctgggtctatcttcttgctgttgacgctcaagtcgattctctgggtctacccctggggaacagtattgggctgcgctatacgaacccccctgggcgacaaaggtatcctcggcctcgcctcagctggtgcgcgtgcccggattcgattgtcgaggatttcaccggaatcaagtgttgaagaagtgttgagtgcccgtcaacttcaagctaccaagatgcctggagaacgaggggcgaagaagagtggacgcggtgacggaggacgcgatgaggcgtcacgtcagttgcgtcgtgttcaaggtatggagcctgaggagcacaaggacctggaaacagtcgtccgcgacgctcggaaggtgaagaaggctgctcgcgagagcgaggcagtgcaaggtggggacgtcgaggcgtctgcagtccaaggtcagcttgctgctggatcgcaaactcaggaggaagaagtttcccctgggttccaaggttcgacggaggtgaattctgggtcgcggattcctgaagtcccagaagaccacacacacgagggtggtgctcaggcgtctgagggaggcgccaatgcggttgagcccccggaggtgattgacttggtctcatcttcggacgagtctgttgtggaagtgaagtcggagcacgtgcgagcgaaggagaaggcgaagactcagagttccaaggtggattctgggttcgcaccacctgaacccagagtttcagcgccaagttcgcaaggggcacccaggaagacgcctgaaagcggcacccaggaagacgcctgaaagcgacatccgggaagctgctgcgcctgctccggaatcgggagcagcgacgttggacgccgggagtatggtgctgtacgttcgacgtgaagttcgacgctgggaagaggtgaatcctgggaaggtgacgccgccaagtgtcgtttatgagtggccgactccgaaaccggatgccaactcgtacttcgcggccgcgtacgcaacgggacatggcgtttgtctctggaggatcaagatgaagcctggatctctgagtttcacctcgcccggtggggcgtcggaactgctcaggatctcatggcgactacgattccccagagtatcatgaccacccgcgagtgcgtcgccattctgcagactctgtttttcgaagccggatttgagtttgccaatttgatccctagctggtcttcgacgcgtgcttccaggattccagaaagtctggtgcgctctgtcatggaggaaacccagaatttcatcgccgtggaactggtcgagtggagattggtgatagctggtgtgcctttcaaagtaaactctgaagatcacgccgcaccaagcgcccaagagcaagcaccaagactggactaccacaaggaagatggagacggtgatctattgatgacggactacgatgcggatcaactgggccgacagtttgtcctgagattcagagtcactggactcaggatttcacgagcccacgagggccgagtgatggtgagccacgatccaagcgtactcagcatggaccgcctcggccacaagttccgtcaacgccatccgcgctgtctacaccgtcgctgtcccctctttcagcgtacaagtcttcgactggtccctcgcttcagaattccactcccctgaattccatgtccaatggacgtgattctctggaggcggaagtcaaggacgctaccccaggcgcggtgccaagtgtcatcggtacctcgcgcgcttcggatgagagtactgcctcgggcgttcaaacgttttatggtagctcttcgtcttcgtcgttgatgtcgcttggccatcgagttggagctctagcgcttgtggcccagagtaccggtggctttgcagctgccggtgatcttggatttcaggtcaccctgacagtcatcccgtcgcgtattgtgtcagtcgaccaagatgacgttgagatggcatcgtcggtgcactccgacgcagagatcgcacccaggaaggccggtctccccaggatttcagccacgacttccgagccgaaactcagtgtttctgcccgattgctggatttggtggtccaagggatgtcagcgccgatgagcggagtcaacaccagagctctaagagcgaggtgcgctctcgacgcttgacgaaatccagaaaatcatctgcgtccagccgctcgagtggatccaggaatcttgggtcagttccgtgtccgcgaggtctgggcccgaccaaatcgagctgaacgtcttgcgacaacagcaggagtggcaggcccgcatggaacaggagcaacgcgagtttctcgccagagaacgcctggatgccttggagcgcgagcgcctcagggaacacgtgacctggacacgcgtcgccagatccaggaacttacggatcgcttggtccacgctgagatcgcccgaggagaagcggaacggcgtgcgcaggacttggaggctcgccagacccagagttccactgaaactcaggggatgacccagagtatcacggaagctagcgtgagcgcctggatgccgcctacgccaagcgctggcaacagcacgaagccgaagccgactcggagcgcgcgcgctgggtttccgagacgtacgccggttggaaggaacaaatgtcaactatggatcagaaggtccaagaacttgaggcggagaaagagcgagagcgggagtcttccgagaatatccagcgtttccacgccggccaagtgcgcgaccttcgtgcaacattggcccaagttcaagcgcgtcgcgcaaccgtcgcccctgatttggcaacaaatgtgaggtcgtcagtggctcagaaccctgaagttgcaacccgacccaagaatccagtggcgtaatcaacggaaacgcatgtgtcacaggccagagacgggagacagctgattcgaagaacacttccgaagtcaccgcctcccagctaagagcgaccctcgcgcagacttccgccgacacttccggcagaatcgcgcgcgtcaagcggggacatggcgctacggagaccaaggtgacgcaggatgtcaagttcgagcctgtgtctctggggaagacgtcggatcccaggagaacagcgacctctaaggcctcgcaggactctaaaacagactccaagcgctctgcacccaagaaacaccagcagaagaagaagaagcgtcaggatgtcaatccaccctcggactcagacccaagctccgattccagcaatgatgactcgtcctctgagagttcgaatgacagttcggacgggaaccctggggttaacctgacgacggcctctacggctcaagctggtactacgctcctgacgttcaggccgtacatcaactcgaatactctgggtgagttcgatactaaggcgtcactcagggaacgcgtgcattggtgggagcgttttgcgaacatgacggctcagggaggttggtctacgaatatgcgaattcaggaactcaagttgaaactctcgggagctgcgcgtgactggttcaaccagttgcccaaacacactcagcgtgactggaaggagttggcgtctacattcaggaagaagtaatggaaagcgcgctcgtcgtactctgaacgttacttcacgatggagatgaagaactcagagagcgccctggatttcttttatcgtctgaattccgccgctggcaaggctgacattgactttcgcaagtcttcgaagcgcctggagaaacatatccggaggttcatcacgaaactcagggacacgcgcctcaagacgtcgctgcagggccagagattcaggagtatcgctatctagagtacgctctggaacaggacgaagatgtctggagccgcagcgaccatgatgctccgccacccagagttcgtgactttcgtgccgacaacattcctcagggacgtttcaagccgaagcgacaaggacgtgcgtatgtgactaggggcgatgtctctgactctgagtcagacgaagaccctgaaattcacgcgcgtttccaggaaatcacggacgaacccagagtttcagcccgaagtgtgagcgcgaattcagggtcaactcgtgagatctctggagaagaagcttctacgcctagcgctgggagtctggcgagtatgatgggtgccgagtggactcagacgctgacgaacgaggtctatcgcgtgatggataacatgggatggcgtccaccgaacgcccaaccaggaccgaacgcgaactctggattccgttcccctcgccgcgaaaacccgaattgggacaagttctgcgagaagtgcggcaagtgggggcacccagaggaaaactgctggaaagaagtgaagtgtgatcgctgcctggaagtgggtcatccgactcacttgtgtcgcgcgcaaccgtgcgagaactgtggcaaacggcatctcgggaaaccgtgtgaagactggaagacactggaagctgtgaagaaactcgcccgccaaggtgcactgaaggacatgccgagccaaatcctggataaactcctggatggcgaagcaaactctgggaggccgtcaaaccaataagcccgctgggtggggacccagtacgcgccgggctgaagaaggccccagagttatgtgttctagtgtatgtaggcccggagctgagaacaagaacccaagataaccaacaatgcatgactactttgactcaggatttcatgacttcccctgaaaatcagcatcctgaacaagcgaactctgggtcggtgaattctgaagaattgtggagtacaagctgaaccctggagagcgctacggatggtgggaaaacaatgatcctgacccaaagaaacgtgatgtggcgatggtgcatggcgctgtgaacgactgccggacgagagttctcctggataccggtgcgactgtgaatattgtgagcttcgacttagcgcgtaagctcggactcacactcaagtcgcacaagcaaaccaaggtgtctggcatgggaggcgttccgacgtacatcggtgccagtgctcaggtgaagattactctcggttcgagggtgatatatctcctggatatctggattgctaacatcggcgaagggatcgaagttcttctgggtatgagtttcatgtttgcagctagagtgaggatcagtgttcgcgaaggtctcgtgacacttccggatgaagaggcgatcatgatgtgtggatggactccataggatcgcctgggtgtcgacatgcctgtggaaaccacaggtagttggtacctggcccctggggaatccaaggtggtgaagatctcgtatggaccgacgaacccacagcgtgaggttgtgtgggcaggacgaggtgaccgctgggtaacgcacctgatttacgctgcgagatcctggccggtcgccgtgaaggtggtcaacatctcggacaaggacgtctggattcacaacagaacgccagtcgcccgaattgtggagtacggcttcttcccacgtgctggacgctttgtgggccctggttcgtttgcgtatcgggagtggcagacgcttattctggagagtgttcagtcgcgtgagggcagacttcgggcggaacgcctggctgcgcttgagccatcctgtgtcgagaccccagagtatcagtggcctacgaagattctgccgcgacctgcaaagggccccgacatggcactgcttgcctcgattctcaggaaaccgaagcctcgtcgcgtgcgcttcgctgaagacgctgcaactcagactgaaggagtgcctcctgaagaccctcctgaactccgagacgttgctgttgatacgagtgacttgggtgacgttctgaaggaggcggtgaccgatgttgcctcgcagactgtcggaaccccagagggcatgagtcctgaaggtgatacggccgctgaaaccctgagtttacaggttgaagttggcagtgattatcagggtcagtggtgcgacgaaggtgattctctgggattcgatgtggatgacgacgattctcagggtgctgttgaagattactgggatcccgatctcagggacgccgggaactccgttggagaagctgaagcaggaatatgagcgctgcatgcggctttcgacagaggacctcggctacgagcctgcggtctacatacgtgaaggaagtgagttgctctcttagttgcgtgaccagttggttatgcttcctgagatgcgtgacttgacccctgagggcaagatcgaggaggcagatgttggagtccctgggaaaacgacgcccgagatggaagaccaagtgaggcaattctggaatatcatcggaagatcttcttgggagacggcaatgcagctcccccgcctgcccgtggagtggtttgtgacctggatgtaggcgacgctaaacctgttgcccagcgtccaaggtccattgcaccacacctgtggactaaggtgtatgaacttctgaagaagcttctggagaacgggctgatcgagacttctacgtccccctgggcatctccaatcgtgatcgtcctcaagaagaatggcgtcgacatccggatgtgcatcgactatcgcgtggtgaatggctttatcaagctctcacactatccgctgccgcttattgatgatcttttgattggttttgagtcggcgatgtggtttatgagcttggacatggcgagtggtttctgggctatcaagatgaccgagagagccaagttgatctctgcgttcgtctgtccctctgggcactaccagcgggtcagaatgccgtttggcctcaagaacgcgccgctgatctaccaggcagttctcaataactgtctgtggggatttctgcggctttcccctgaggaagaagctgaggtcgaccaagatgtcttggaatttttggggttgaactctggggaacccagagtttcaggtgaaaatgcaccgcgactttcagtgttgacggatgagatgactgtttttcagcgtaacatcccggctccctctcagatgggccctgtcctgggtcgaagctcgtatatcgacgacatcgcccacggtgcgcctacgtgggagcagctgtgccaggatctgaacgcgctgctcttccgactacgtttctggaatatctctgtgagtcttcccaagagcgaattcgggaagttgtccattccgtacctctctcacgagattagtactgagggcatccgagcgacccctaaaatcgcgaagggggtccaagacttgccgttcccgacgacactgaaaggcgtccagagtttcatggggagtctgaattactacaacaagttcattgaagatctgcccgtgatcgcggccgtcctgtacgagctgactgaggaacaagtgaaatccaggagagacctgtcgagagcccaggaagcctttgaaatcctgaagcacaagattgtttcgactccgttactcagacatcctgatcgttcaaggcccttcgtgattattccccacgcgaacccgtgggcagcatccgctgtgttgggtcaggagtacgacgggattgtgcacccggttcgattcacaggtcgcgtcctgaatgacgctgagctgcggtatcacattgcggaaaaggaggtgattgctatcctgagagtcatggaggtgtttcgcactttggttgaagcattacgctcacgaagattttcagggtgggcaccaggggatcacgaggacgtacgagaagctgcgctctgagttctactggcacgacatgtacgctgatgttgaagttttcgtcaaagagtgtgtggattgcgccagcggcaaggggcgccctcagaatccagggccttcccctgggaacatcgaaccgaggcgcccttttgaagttgtgtctatggatttcgcgacacacttgcctaagtcggaccgtgggaacacgttcctgctgctttttcaggatgcgttctcaggattcgtcatgtgtaaacccatgagttccaccacggcgcaagatgtcgctgaagtgtacgaagagcaggtcttcaggagattcggtgcgagctcgatgctgaggcacgaccaagacccaaggttcatgactgaggtgttcacgcgcttccgtgaacttttgggtagcaagcagcgagccactctggcgtatcgcccccaggcgaacggacaacaggagcggtcggtgcagactgtcgtgcgcagcattcgagcgtacattgctgaggcggaccagagtgactgggacgaccatgctgagcgcctgatgtttgccctgaatacatcgttcgatgccactcgcctgggcactccgttttatctggtgcacggctgggacacacacggcacggtgtctgcaatgttaggacccaggccctcgagtatccaggagcgcactgcgtacgagtggcgcaggaagctacagcgtgactatagttatgcacaagcttgcgcagaggatcttcagaagaaggccaagcgcgcgcgctctgccgaacaaaccaggaagtggagagagctgtccgaacgactgatggcaggattcgcagccggtgatgctgtgtggctgtatatacccaaagtgcagcccaggctgagccgcaaactggctcacatgtggcatggccccttcagaattcaggaaatccatgacaacttccgcgtgaaactcagggtcgagaacacaggatatcgcgtgaatccctgggtacacgtgagccgtttgaaacccagagcactattcccgaagcggcccactgtggagatcgacgtggacgaggatgatgactttgatgcggcgctgttgcctgaagacagttgggagcccgacgctgcgaacgatgagtacgaagttgagcgaatcctggatttgcgatggattaagcgggctcggacagcgagacgaattcgtgagtaccttgtgaagtggaaggggtatgatgagaccgagtggctgcctgtgtcgaagctcaactgtggtgccctgctctacgaattcaatcaaggcgcaagagcgcgggcccgtttccaggccatgcaggctggagatgatcacccaggagtctagcactatggggtggcaatgacccagagttacacgtgatattcaggggaaactctgggtgacactgtgaaactctggggaaaatcgacagaatgtgtgaatattggagacggaaaacgtgaatgtgatttgacttgatttgattatggagaaggtgatgctgctgaggcgttggcagtgtgtgagaaggaaggtgaaggcgaacgacgtggacataggacaccgatcccagcgtcggcgccacagacttccttcaacccctgaagatcctcgtcggagagctcctcaaagccgaccaacgtggtcgcgccgccgtagccttccatggcgaacgcgcccgcgcgaatgtcgttcacgatccctgggatccccacgagatacgcgttggtcttgagattcggcggagccggcagtttccagtgcgggggggcgttcaggggccaggaattcagggggatcgacctcctcctgccgaagcatgcctgcgaaaatgagtcccctgacttcctctagcgtcgcgtgtcgtggtaacttgaactcaggggcgccctccatgtccacgtccggagccacgccgcctgcgtctggagcattggactctgagttcgcgtcaccagtttcctgggttgcagcgtcagtcgaggcgttgccatcggcctcgcgcatgtccgcgtcggaggtcttgccggtggcgctggagaaggagacgcgcttggtcacgcccgtctttgtgctgcccgtcgaagtgtcgccggacgctgagttacccgcctggccgctgccgccgcctgctggtgcggtgctcgcaggggcgtcgccggtgcgctgctgtgtcggaggtggcgcgctgccggggggcaccgtgccttgagctggcgccgtcgcttgcttgccgtccgaagtcgcgctctccgccatgttgacgatctgcgaaatggcgatgtggccgcgcattgcccgttggagtttttgcgtttgagaggagaaccttgaagataggtcctgaccaaccgttggggagacagggtgccgccaaagtgagtgaaaccctgggagtcgacagagtgcaacggccgtatcgaagtcgacggtggatggacctgtgtgtttttgtggcctggccatggttcaccagttcggagcgatttcctctttgatggaccgtgaaagttaatttaaatcgttaaggccctgtggccgaccgtctgggcagtgcccaaggcggtgctagagtaaatcaacctgattggtcaatccacttcaagttgaagtgaattgacgtgcgtcatacaaacgtcaatgtagttgatagagataatgcaccatgtgcatgttttttccttgtcatgagtgaagttttttccttgtcatgagtgaaggtgcctaagctagactaatgcttacgccctagccttgcacttgaacggggcgggccgacgacgtgctcgtcacgtctcgatcattacagtatcagcagtaaccttcgaccaggcgtcctcacaccacatcaaagcggtaagaacgtcaaccttataaggctcatctactccttctcctatttggtcgagcgcatacaacattttctccaataatacatacctcttgatacagtggataataccttggttggtaggtcgaggctttgctcgcaaatgaggaagtgaacgcttttaaaggaaatcaaagtggcgaaagcgcgccaatattcaaattactgctgaatacgacgtcacgagattaattgatttttagctcagtacctttgctcatcaccatctcgtcacctcgtaagcccagaattataaattatacaagggtattagctgtagacccgtccggtattcacgcacattactgtataggtttgtgtgatacacatgagatgctgtgccacattaaattcgatttacatatatgggtttgtggacataaccctagatcatgtggcatacaccagtctcgaatttgacacgcaatcatttcggcgatttctccaagagcatagatgagcgtgaggtggtcaatgtcagttggcaaattgaccgcgggtccgcaacccacctacccatgtcggtcaccacagaaatcccaagcgctccgaccaccgccttggccgtgacgctctgcgtgctggcactcacgcccaagatcatgtcggtacttgccagtgcgcacttcaagctcaccgcggagcgaccaaagctcgtgttcaagtctacgcccaagaacgagcggttgctggccaactgcgtgcacctcgtcaagaagaagttctacccgctgtggtatctgttcaacggccacttgcagacgctgcagttgtcctgggcaaatgagatggagcccacgcccgccatcgcctacgagcgccagttgctggatatgcccgacggcggagtagtgtccttggattgggcgctattgccgtcgactaccacgaaggataccaaggaatcgctggaggagcgcgttgacagcaacaagaagaccgtgctgattctaccaggtctgacgggtggcagcggcgaacattacattcgcagcgccgtcgagcgactgaacgccttgggctggcagtgcgtggtgttaaactcgcgaggatgccagaacactccgctccggaccccgcgtttgttctgcatcgcgtatacggacgacttgcgctacgtggctcgatacctcgcggacaagtacaacttcgccgacgaggctttcgtcggactggggttctccatgggctcgaacgtgctggtgaagtatctgggcgaagacggggatcaggcgcgactgactgcagcgatctcagtcgggaacccgttcaacatgcccaagtgctcggagaacattgaggggccgctcttcaaccgcctgacgtacagccgcgtgctgagcgcaggactgcgcgacctcttctttaaccgcagcaacgcacatgaggtgttccgcgactatccgggcatcgatgtggaggcgctcaagaaggtcacgaaggtgtcggagtttgacgagctgttcacgatcaagcacttcaactataagagcgtggacgagttctaccaggacgggtcgtgcgtcacgcggctgcccaaggtcacggtgcctctgctgtgccttaatgccgaggatgatcccatcagcgtggccacctcgctgccaacgaaggaggaggtcgaggctaacgagaacattatcctttgcacgaccaagagcggcggtcacctcgcattctacgagggaaactacgacgaaggcgaagaggagaacgttaaggcccaggaaaccaagcccaagctgcgcccatggtccgtcaaagtcatcggtgagtttgcggagagcgttctccagtgcaagcaggtggagaaagccctatcgtaagtatttggagcttatagagtgcttcgaggcgcaccgtttcaaatctagtttatattgacctactacacggtcgagatgatggagggcaaggtacacggtcactatagcattgattgatgaggcttccagtgggggactcacgtgaagttttacgtgtgcaatgcatagatccagtggctccgtgacttgggtctcagtcacgacaagatcaacgtcgtcattaagcgccactccaataggtaaacattgacagctcgttcgaattggttacatcgattgcgttcagtttaaatgcaagttttcttcacacggttacggtatcacgccagtgactttcgtcgaaaaactcagggcatctccccgctacgataccataaactctcgatcaaaagccgacgtaccgatctgaataaatatgctttgacacaatagcctaagaataactagctataaagactcatgatatctagatacgcaaaaagggacttgctcaagtgaaacgcagttcgtgtgtaaacggcatgaagttggagcaaacctgcttcgatcggggaaattagtgttttgacggtatggtccaggttggaaacaagtctgcttcgatcggggaggttcgtgcgcaggtttggcaaagtcgccgaatcggcagagcgtcgacaatgaagtcaagtggtagtgattgatgcgcttcttgtcggcgcgcgtcaatcgctgccgagcctgaaccacatccgatgcggtatcgccttcaggcagaacacagttgcgcgagtttgggcggcgattctggacaagcaaatcggaaagccataccaactgcgttagactcgaaacgtaaattgggaagtagtagttccaaccatttcgtggggttcacgatatctacctattgtagatggataatttcaagatatctagaactaattctatctagaatttcaataataataaaaaataaaataaacagactccaacacaaattgaattatttcaaccaaacgagttactatactacaactaccgaaccaagcttcggaaacaaattcacaatccggcgcaagacgaagaaaaaaaaatcacgaaaaaccagcttcaaaaagaagaaagcattgcgttccgagtgtaaattctacgccactgcgccaaagcagaaacttggtcgatccaatacaccaggtggcgcatgttgtcgcgagttggtgcagttcccctaccgaagatatctcaatgaaatcctcggctgcatgcagaacctccaccatgtactagccagctcgaggtttgtcgggttctttgctgccggttgaatcccattcttgcgagagatgtccgccatgttcattccgctccgtcgagcaagaaatgcgacttacttgcaagttaaaaaaggaaatataaaagtagcaatatagctatgcaataaatgtagctgtattattgtttatttgaaaattatggatatatcatccacatcttctttgtgcgacgcgcggccttgcatcaaggcaaagcgccaatttaggagagagtgctcagtttaagagagaccttttcagccagtaatagtgcagtattctttaatcaaagcgctatgattggtcaataaccttttatgaacagagacgccagcatttgcatacaaacttcaagcttaaatctctcttaaactggagcacctgctatccgagacgtcttcataacttgcttggttttgtgttgccttcacaacgtttttgatcagttgtagattcataaatagtcgaaaccgtcctctttctgctggtgccaaaaccatcgttatgcgccaaaaaatgacgccggggcgacaaaacaaaattgacactccgaaatctctcttaagctggcgctttgccttacgagcaggtaagaaaaagtaggcaatttaagcggttttcatttaacgtataataccgaatagtatgtcctaaggtattagagtcccctgcgaatagagcgccctatggtgagggcatactataacaatagagtgccatcaaatagagtgccatttattagagcgccgttccgaataggctgccgtcgaactgacagactgtacatacacgttgatattatacatgttgaatgcgttgggtagctacttaccgcgctcaactgcgatgccattccggcattgatcgcgctgcaagacgacatcgtgccagttttgctttttcaggagcacagacaatcaaccatacgactcgacatcaaaatgcaatcttttgagtggattgccagcgcaaaactggttaataatcggaagtgtagagtagtaggagaacctgcaccccgattgcatgaccgaattcgatgggtttgcgtttcggccctcctcaagaatagtatgccgcatactaatggtattatacgttatagatttttaaatgcctggtccttttcgctatgtgctccacacaacagtagtgtgcgccacaagaacaactccaagttgaagtttgggtcatcagatcttcgcagctcactcactcactcacttgctaatccaccaccaagaagccgtcaaagcctacacccctacacccccacacgcccgatgtccgcgtcccccaccaagaagcagaaggtggccggccccttgacggcgcacaacctgatcgacggcgcgttcgtgccgccctcggggggcgactacctcaacgtcatcagccccagcagcagccaagtgatcggcaagtgcgcgctgtccacggccgcggacgtgcagctggcggtggccaagggccaagaggccttcaagcagtggcgccagacgaccgtcaaggcgcgcgcggccatcatgctcaagttccacgcgctcatggtgcagcaccaaggtgggagatagttagagggccctgagaacaaattagaggggtgtttcattaacattggggtgtatttggggggtggcagacgagctggcggacattgtggtgcaggagaacggcaagaaccgcacggaggcgctcgccagcgtgctcaagggcaacgagacggtggagtacgcctgcagtctgccgcagctggtgcagggccgcacgctgcaggtgtcgcgcggcatctcgtgccaagaggtgcgcgatccgctgggcgtcgtggcctgcgtcgtgcccttcaacttccccattatggtgccgatgtggacggtccccatcgcgttgaccatgggcaactgcgtcatcctgaagccgtcggagaaggtgggcgctgagatctttgtgttgttattttaatatgagacggttgagctgattcttgcgttaatcgtaggttcctctgactatggcgcgcgtggcggagctgctgctggaagctggtgtccccaagggcgtcttccaggtgagtttagttgtgtgtgtccaatgctggaactattgctgatggtttggatggttgtgactatggttttagatcatcaacggaacggtggaccctgtcaacagcttgtgcgaccaccctggcgttgccgctgtcacgttcgttggctcgagtcgcgtggcgcagctcgttgctcgtcgatgccgcgctctggacaagcgtgtgctcgctctgggtggcgcaaagaaccacttggtggctcttccggacgcagatattgatgtcgcctccaaggatattgttgcgtcgtacgctggttgtgcgggacagcgctgcatggctgcttctgtgcttttgctcgtgggggattgcaatgcgctgctcgacatgatcgttgagaagtcgaaggagctggctcgcggaactgaggctgggcaggttggtgcgcttattgatggaggctcgaagacgcgcgtgctcaagtacatcaacgaggccgaggctgctggtgccaaagttctggtggatggtcggtcgtgggccgaggagacgaacggattctgggtgggacctacggtgctgctccacgcaagcccgaacgacgctgccatgaaggacgagatcttcggtcctgtgctttcggtgtatcgtgtgagctctttcgacgaggctcttcagatcgaaaacggaaacgactacggcaatgcagccgcgatctacacgtcgaacggggcctatgctgaatatttccagtcgcgcttccgcgccggcatgattggggtcaacatcggcattcccgtgccacgtgagccgttcagcttcggcggtatgtacggcaccaagagcaaatacggcgacatggacatcacgggcgatggctgcgttgagtttttctccacgcgccgcaagatcacgaccaaatggagcacggtgatccactcgggcgacgcggccaacttcagtggccagatgtgagcaattgagagctcttacgacgaacgatttttcttgtgcaagatgagtttggccaagtgtacaaccccgcttgatcgagccacagaaagaaaaagcttacagattccagttcttcgtcggtatgagtgttttgttaagcacaacacctattcgtaaagttattggacttggaacaagccgacaacttggtactcaactcatgcacggcattcaaattctgagcaacacctccgtcgtcacaatgaacaacttaagtccttgctgtcagtttagtcgcgtacaggacaagaaggggctgtgcggttggaatggggtcggaaagcgtgtgtagtacaacttgcgcgcgttatgagcgtcctgctacgcgtcaacgctgtcggccgcgttggtgggggcaaagcacagcgtgacagcgatcgcggcgatgagaagcgtcttggcgaactgcatcttgaagcgtggtctctcttgcgtgggtcgtagcgaattggaaagtgacggtgagaacaccgtctaaagtttgcgtcaaacgataatcgtagcagcttctggctcgcttacacgtacttgccgtagggtgcgatttgacagacggcaggcatcaaagtttgcgttagatctgcggggtgcccgcgaagcagggccgcgcggtattgcggaggtgggcccagcgacgagcattccagcgaacggacccgttgccgcaactcggagttagttttctttttgcgggggtctggggcagaacaccttttagcacatcagatccaatctcagatctgtaccgtatatgaccccaactggaggttaccgtgctcgcgatatccctgcagcggcaacattcgcgagataaaagagattgtatatgctttttcggccctccatttttctagtgacgtgaattactatgaaacacgtacttattaataaaaaacagtattactaagttttttttacacgacgactacatcaacagagggctagtacgacttcgcgcgttctgggatcggaagtcccctaccagctttccgaagattgagctcagacattcgttcaaactcgctgccaccgttatcttgatcgaaagccaactcctcgcgggcgatcgccactgtgtcgctccctaatatgtcctcaacgcacccgccacaaaacggacgcttcttctcgagaacggtgcggccgtcagacgccataacataaacgatcttctttacagtacatcgggtgcacatgagttgcatgcagctctggcaggtttcgcggcttgtaccaagaaacccgaagctgttgaggcacaaagtgcaagcccctggacgaatagatgacgatggagacgctttggcattaggaggcaacccaaagctggagcttgagcatgtacttgagctggagctactcgcgtcggagcttctaccgtcgagactgtttctgcgcagcttccagacgagtttcttcatgcgtgcacactccactttgcgtccaaacgacagccactgcgacgccagtgcctgcagagatacattattcagcatctcgttcttggtcgggaagtcgaaaaaccctcgcacgtagcactcgacagtcgtcggcgtcttctgtttatacagcgagcacaccgacatgttgcctcgcaagacaccttggctcttgaactgtgggagttccgagaacgcgactgagtgagcgaagttgtatccaacgcgctcgcccttgctcgagtgcacgactccggtcgcatccagcgagatgtagtcgcgtccgtggtagagcttccacttgatgccgacgtggtggaacggatcctccactgaggcctcttccagctggcacagcatcttggtatccagcatcccgtcattgacacatctcgacttgatcttcagcgcagcgtccgtgggtgccacaacgccgtacatgacgtcctcgacggtcccgtccaccgttccgaacagcaacaatgacggcgtgaatggtgcttcgccacgcccagagcccgggcgttcacggtagatcctgagtccatctttgcgccgcatctccttccactgccccgtggccgagtccgggtacccgttcttggtgactagcagggtgttgcactgctccaggttgtgcgcgaccagagtgctggccagatctcgtagcatgactcgatctgcatcggagaccgacagctccggtagcagatccaccagcctgctcttcattcttttggagcagaaaacacagcggagactgtcgtgtccgtgagcagaagtcaaagtgagccatcttccaagtcgggcattccgcggagctgaaccgatgtcggagagagcgagccgaggctttcggaggtgcgagatgagcgccgcaacttgccgctgcagcatatacgcgtcatgcttggcgcaggccaatgcgcacgaagagacgcgagtgggatgcgccatcgcctgtcggccccacgttgaagtgtaggcgcatagccgcgcggcgctgatgtgtgattggcccatcccatcgtgaaaaatcgatgattgggtgggcgaaaaatacttgaaaagtcgctgaaggagatggctacaactttttgagaatggatactcttacatgttcattcatacatgaggagtctccgaatggactctatcatagcgagatctcgacggggtcgctgtcgcggcgcatgttgacgagctcgtcccgtgcgatcgcgacggcgtcgctctgcacgacctcgtggatgcatctgaagcaaaaggtgcgcttcttctcgaggatggagcagtgatcgggccccatgacgcacacgagcttcttgacgcagcagcgcgagcacacgctgtggtcgcagctcttgcaggtcttcctccggcccgggatgaagctgaagctcttggcgcacacgcggcacgtggcgtcggtggacttgtgctttggccgctcggccgcgagctggatcaggtccgagtcgtcgctgtgcttgcgcagccgccacgccagcttcttcatctgcgcgcactccatgttgcgcgagaacgacagccactgagtggcgatcgtctgcagggcgaggatggcgttgctgtgggtgccgctcgacaggtcgaagaacccgcgcgtgtagcactcgactgtgtggttggccttctgtcggtagagtgagcacacggacatgtttccccgtgcaatgccgaggtcggtgaacgctggtagttgcgggaaacccacggagtgcgagacgttgtagccgacgcgttctccccaaggagttcggatgatcccggtcgtgtccagcgtcacgtagtcgcggtcttcgtagagtctccactggaggctcacgtggtggaacgggtcgtcaaccgtaggagataccagctcctccagcactttgctgtcgacgacgccgtctcgaatacaggaggatttaatcttcagcgactcgtccgtcggcgccagaacgccgtacatgatgtcgtccaacttgccgactaccgagcccaatagcaagagtgacgggatggctggtggtgtatcggtcgccgaacgggggcgctcgcggtagatgcggatgccctcgaccttgcgggtggggacccagagccgactgtccgggtgaccgtccttgctgacgcagaggttgttgtactggtcgaggttgtgcgtgacgagggtcgtcgccagctcttggagcagcctctggtccgactcggggatcagcagaaccggcaggaacttggagatggccacgggcttcggcatcgtctcgggtctcgggttgttggtggcaagtctagcaatggccttttcagaggcacgcggggatccggacaggagcctcgtgctccgactcgaagacggtaagcactccactcgtggataagcctgcgcctcaccaaattttctgaggttctgcacgctacgctagtacgccgctccgtaagcagtggcggatccagcggagacctggccactgacttgaccgatcttggcgttaagcgtgtcaacttctagtcacctcggaatgaatggaacgcaacaaaaaggtttttgacgggcattcatattcggaaatgctaaacgcacgggcgttcaactcataagatgctacggagaaaatgtaggaactgcaaaacaaccgagaggctgctcgtccacaatggcgagcagcgcacgaacctgaggcggacagagccgctccttgcaaaaaagaaatgaaagtgtagagtgcgacacacgctgtcggggatgacccatatcctgcagacgtcgcttagcttgtgcgcacgcgcgcggcgtcggccatgctcttccagttggtctcgcagatcttgatgaaggacaccacgcagccgaagaagatgccggccgtgagaccgagccacatcccctcgacgcccagctccatgcggaaggctaagtacacgccgaagggcaagccaatcacgaaatacgcaaacaggttgatgtatgcgcccagcacgaggcgtcctgtaccgcggaagacgccttgcatgacggcgttgatggcgtctaacatctggtatggcatgaggaacagcagtgcatgacccgccagtccgatggacatggcgtcgttgatgaagatttccgggatgaagtagcgcgtggcgatgatgatcacagcgatgacggccgagagagacacagacagcaacatgcccagcgtcgaggccagcttggcgtggtggggcttgttgctgcccaagtagttgccaacgagcacgttggcggccaccgagatgcccaggaagaagttgaacgcgaatgttgacacattcacaagcaccgagtggacgctgatagcgacgacgctgttgggcagccagccgacgatagccgccatgatctcgaacgaaatccattcgagctccatcatgagcattcccggcacgccaagaatcagaaacttgcccaggtgatctactgcttccttcggctgccagcccggccaccactcggctgggatatgcgggttgctcaggtagaacgggaccaaacacaacggaagcgcaagctcggacaacaatcgcgcaatcgccgcaccatcgaagcccagcggcgtgtagaacgtcaggaagacgcccagcccaaggttcaccaagttgctgatcaccgcaatgtacaccatcggcagcaccacattctgggcttgcattaccttcttcaacagctcgtagacgtacatggctgggacaccaggcagcaggatctgactgaatcgacccgcaaactgcgccacttctgcgggctggccgagcatcagaagaaccgcctcagtgtaccagttgatgacgaagaccggaatcatcgccaggcccagcacgatcaagccactctgaaggtaaataccgagcttcttcggtttgccagctccatacgcctgcgagcacagcgtgtccatcgctgtcgccaagccgaagcccacaccgatggcactaaggttcaagaccatggtcgacagggccacaccgtccagatactccttcgtcataggggaatccaaatggcccacgagcgtcatgctgaccaattccgggaagaactccagcacatacgtgaaaataacggggtacgccagcgtgaagagcttgcggacttccgtcctgacctctgggtgagcgtcagtctcaggttcctcgagaataccggactcaatgtcggtctccgaatcccgcgcgtaggactgaagcagtgggaactcctccttgtccgtgtgcgacttcttcgccttgctggccgccttcttcaccagcacctgagactcccaccgatccgcggccgagaaagacgacgagcggatcggaacagccacggggctgtccgagctgtacgacgagctgaacgagctcgtggacgtctcggagtcatccccagactcctcagatatcttcgaggtcgccttggcacgcgctgcagcgctgcgacttggtccgttgaactgcttcttgatcctcgctccaccgcgcggactcagcaactggtgcgcgtccaagctccacttctcgacatttgacttccacgacgttgcgctagactcgtcactcggaggctccgacttggccgacttgagagtgccgtagccggagaactgtcgcgtcatcgcagcgctcttcttcttgagtggcttggcgtcctggttggtggtcagcggttggagcttgagcttccgggcggtcttgacctcgcctcgaggcttgggcttgccggccgcgtcggcggcctgttggctgtgccgacgcttggcttggtctctggtgcggcccgcagcggacggagtgggcgcctggccgccatggtttcgtattaagccgctattgccgctactactgccactactgccggaactgtcgctgtccccggcgctggagctgtcgtcctcgccgacattggccacgatcattcccatcgtcctcctggtctggggctgttgtgcctggctggtcgtcagttgggaactggggcttggggccgttgagcaattaaagattgaggcgtctcgcggtctgatgcgatggagagctgctgctgctgcttgaaacgcctaacaagtggggtatcgattgattcttggataagctgacgtcgcgatagtcacacacaaaacacagacacagcataaaagttagtttggcggcgatataatgcggattctggagtgaaaaactatggtaaaaacccgaagaggcgccccgtcgctatgaatagcaacacggtctccgctaaagccatacaaaaaccaagatcaacccgcagggtggcatctccgtggtatctgatatgatgaaatgtatcactcaaaagtacgtacacgacgtcgagggtggtccaggtaatgcagtcggcaaatttcgccatgcagcgggggtggcgaggctccctctgtgtttagtttcgagctcgcgttgcgtggggacccaagcaaggcgaggcgagcggtgtggtggttgcaaaaagtcctgcaacgggggagtcactccaaggcgttgggtgggtagctggactgggctgagtgcgttcgcgcgccgcttggggctggttactgaaggtgcggggtctttcgaggagacttgcgtgcgagagcggaggttcggaaatgatggacaagtcgcgcttggcacgccggcgattgcgtaaaaaactgtgtttttagtgggatcgcagaaacgaatagcaaatattgtaacggatttgacagagaatcagtgtaggcaaatacttttgtatgcgtttaccttctgaatgtaaatattatcgaatacgcggagattgttgtatgaggttgtaaagggtagaccaaatatcgggtattgcggacttaacgtgggtggagcagggggatgtgagcttgcatttcttccttccgccctctgcggacgaccacgacgtcatgaccgcgctggtctggcctggcctggccgcggtctatttcgaccccgcgcgaggtcagcgcgctgatgttacgattgcttgtgttacgccgctggagtctgcaaagcgcgtagcgcaagcaaagcacttcttgtcccgacgccagctggggtctcgacgcgcaaccatggcaccaggagctgcgagaccgtcgaggcatcgatcctgtaaatggcagcccagcggatactacatgtagagagagcgtaccgagcgcttcgatcggcgagcacttcacatgtcaaactgcgacacatgataagagaccctgcaaaactggctcatgcgctggtttttattcttgcatggcgcgcttcgatatgcatgttctcagcgttttttaatcgcttttggcttgcggtgcttgttcgaacgctgaattgcagttcacgcagggcggaccattgcgtgccgctcgagaccgaaggaaggcagacaggaagttgggcctcaacttgaggcagcttgcctcgacggaatctttgggagatctcggtgcacgccgcctggcgtgagggcaccggatgaccaggatcttcgcgttaaaaaaatgcgagcgagatgaatgcatgtgggccacatgaaggttatgtgcaccacgctacatacgttcagtcgaccaccgatatttatgtggtacacatggtattaggatcgaccacagatagatctctcctagaggctccaaagacatcgagaacgattacgagctgtaatctgtaattttgagaaaatatttgaaacttcagcaaacaagctgtaaatttaattttaatatcatggttcgaatccatttttgtataatccgctcaccataaatacaacacagccataactatttatatctgagtagaactacaccgttaatgctccgcttgtagtcacttttcattttgcaccatgccaccacacaaccagcgacgcaagcacacacggaactttcaacgcaaggccgatggatcattctggaagctcaagtccaacaaaaaaattccgacccgagagccgtccgaagagcggaacgacgctccggtcgaccgaggagtggggctcttcggcggatcccgagcccgacgaggtcgcgcagagcagacatttgaggtagaacggctatacgcaaaacgatgggtgcacagcctcgagttctacctcgttcagtgggtcggctaccgagagctgacatgggagccctcgaagaacataccctggagacttaaggtagacttcgaaatagaaacgataagctttgtttggttgtaccaaccaacacgaggtcgccgacgctccaccaagaatccaactcggcgcagctcgcgcatcctgcggggtgcctagcctaaccccgagatagctaagttcgcgtggcgaatttaatacatactgccatcagtaggttcaattgatccataagttggggacgattcagtacatacatactgtattatggaaattcctctagtgtagtgcttttgtgtaacttgatgttattgacgattcacgcgcggtctggatttgtgctcggagtccataaggccaacgagcatgctactggacatgtacagtagcaagagcacggtccaggtggcgtacagtggacgagcggtcaatgtacatggcatggttgctgtttggacctggatacatatgttagactaggtcgtcttcgacttggctgggagcacctgtggtataaaacgctggcgctggtaccggtgctgattgccgtgataaggaagaactgtggcccccgcaggggccacacccatgaatatcgcgcgtgccgcagttcactttctgaagctggtgcatgttgttgatgtcgctgtgcatttcctgccttgctgaaagttgccgttgaacctgctcggtcgacatccttctggcttgtgtagcacgaaggttgcgtcaggttacgcttgggagctgtccaccccctcattcttcgggtgttcctagtataacagtccaatgacaaagcaacaacggccaataaattcgtggtacaattcatcttcgcttaagaaaacgcattagaaagatgtagtctacatcaggtagaccctactgttgtagtacatgtgctgcgttcatccctgagatgtagaagacgtacctacagaagagggttcgtttgcgataatgctacactgtacaaccaggactcttatagaatacatgttcgtggctgtctcgagtcgagactcccgaccatgcatcaaggaaacgaagtagcgaccacctgctactgaggaatcactactccagtgacgtggaagcaaaagcacatcactaggaagacaatacttaagtatgtatttatgtaattatctcgctgctatcccgatgactttgatctgacaatacaggcaaacacacgtttagactgtgtatgtagacgtacaatgtataggcggtattctacatgtggtttttaccaggacgaccagtcgttgactggcactagactcaactcgtgggaattcgtgatccagtagtgcctcatccctctacagtaccagtacggcactctccgatcggagtggccccctggtggtctagtggtctacgtccctcgaagctatcccattcaaaccaaccagaatcaaaatcaactatcttcaacataaaatcagcacagcagcggacagaatgtacctaccagcattgattcatgctctttcgtaagacgatacgggtccctagagaacataccgtaagacaaagcgtcttacgttttgcaatcaacgcattttgattacatcttgattttagtataccagtggctacattgtattttgtcactcaaaacgaaagacagtttgtcggacaccagtttgcgccatattattggtcaaaagctctacttgacgtgcagagctgcatgtgcgtgctcgggcccactcaaccacgacagcggtgcggatgcaggctgtgttggtggcacctttgttcgccaagacgacgcagttgcatggcgcgtaggtccgtcgacaaaaggatgatattctggctgcagccacggcggccgcgccaggccttgcgtgaagccttagcgctaaggctgttctgatctgttgctcttaaaatgccacgtccagagcttttcagtgcctggatggtaaggaatagtgtcaggagggaaatattgtaggtgttttcgtactgtcaggttgcaatgtacgtatcatgatgcgggcaagccttccttcaataacgtggttacttacgtagcatatgaggcagcgattctagagcgcttataaccgcaccagtctattgctgtctgttaagcttgaatctacgtagtgtttccgtttcggctttgttgacaagtttctagagagtgctcaagcgtacattctagtcgtttactattcaatgtacgctcaagcacaattcagttctccgtgtaccaaccgcgtcgtgtcctccgaagggcatctccctacttacgccgactacgcggcttcatggaagagctcctcggacctcataaaatatgtataatacacactttcatttgcaggacctggcatttagtaggtcgctagttaggccaaataactgtgatgcacttcacattactacgaaatcgaaaacgaaacaaatacacgtccatgctgccgatcctgctcgtcagcacggctatccgttgctggtgcatgccacgacggcgacgcagacggcccggccaagggcatacacggacaacaccacgcataatattagccaatcacatggctaaaattgatttgtcgtcaaactgtcttacgaatgctcgacacaagtgattgatggtgaagactctaagctcgcacatcaatgtaccttactaaaacagccgctccaactgaaggtattctattggtaaacgcatttattatgaagatttcgcaagtttatagtatattaaagtttgtattgaaaacataatccataaacacaaatctactttgattggccaaaacaataaattagggtgacacggatagtgcatcgtatcttagtttatgcacacgggtaccttgcctttggttcggtggcagttcctggtgtcggcagttgcattctgtccgttgctgtagcaagtaaagtgtaggaataaccagttaatcagcttctattccttcttcttcgatcgtacgacgggaattgagtttgctgttctgacggctagttatcgcgtttacttggtagatggtctttgttagagtgagcagatgggagcaatgagggggaggggggattgagacagtagtggtgaagaagtataataccgtagtacgggcgttatattgacgggttatctacccttccgcagagtgagtccgggacccggtcgaagaagaccccaggcaaataacgtcattgcccctttttagccaataataggtcagtagtctgcgcaagtcctttcacagctcattgccgcagaagtctccctcaacctccctcgtcgctcaagaaacaagatgcgctgccacagaggcttctgggtctacgcaggtgacaaaggcaccgacatctcggacagcgctccacgctttccgcaggagcaagcctctcaagcgggccaggtgtcaacaaggcggcagagaattggctccgaacgcgcgctggaagggctccgaagaagcgctgggagggggagacagcggagattcggcaggactacatactgaaaaaccctgactctaccttttcgctggacgacaacccgctggacttcgcggatggccggcaggatcgccggcgctaccctcgaatggtgcgagccgacatcgctacgcctgtggtactacaggaagaggctccggcagcaccaggtacgacacgcacacccgtcgacactcagtgtcgagaacaagttgatgacagtgtgtatgcaagctgcgcgaacacagctgactatgcactctgatgaagaggcggatggtgcgcttcatgagacgccgactagcgcggctgccgctaactcagcgctgagcaactacgtgcgtgataccattcaagttaacccagacttcaaggccatgcacgcgggcaaggaaaactacacgacccgcagcatcaataacttgcaggagttatattggctaggaaaagtaccttcggtgcaaactttgcaagctagtccatgctcgcctgttgtgtcaagggatgcttcgactacatctactacggtgtgccaggcaggggcgtctgtcgagagactcaatggattggttgctgatggcgcagctaatagcagcaacgatgctcagatatcaccttcggctcaagcaaaacctaccactattacctctcgcaaacgcccccggttgctcgaagggaagcagcgacccgccactgccaatttaaagtcacacgcaaccagcggaaaagagcaaccggctggtaatgcggcagatgacgaagatagcgcgtatgaaccaagcaatacggaggatagtgacgtgaatgatgacgatgtggacccccccccccccgatttttcagaaagcgcgtgtcaaaaaattatccgctgatagtgtggaccgatctcgaagatgaagaaaacccccgaagagtgcacgtttaccctgcggatttggatagcttgcaggctggcgtttggctgacccaaaccgcgctggattattttatctgtcgctatatggagcaggttaaaggattaattcgcgtatgtgactcggagttgtacgtattgatggagactgcgcgattcacgcgaaagccgaaacgacgacgccgactgttagctgacctggtcgcattatttgactggtcgtcctaccaatatgtgcttctcccagtatcgggtcgcaaccactacaggtttttggtaattgagaaccccaggcacccggggccagcaaaagtttatcacgtcaactcgatgaaaaatgctcacagctcggcgtatgcttttggtgtgctacaatgggtcctatcagagacccgtaaatctcgagcagaatcatcggctccgtttgagtggagcacctttgtccatttgaccaagccccagcaatcaaattgcatcaactgtggggtttatgttctccattacatggacgtgatttcaaaacacattgcagctgagaagcctggatcgatcgaggagaagatcgccgcgtggccagagggtgatttcggtgtcaagaacgcagcagcataccgaaataagctgtataggactatatctccagagtgattaagtgtagcacccggtgagcagaaacagaagcacaatcaacttctttttaacatggttccggtcattgatatcatggatcaaaacagcaagtaaccgaatatgtagtaccgcaaaatacactatggtacagcaaagcataactgcggtacctatcgcaaaacctcactgcggtaccacattataatactgcggttcaaacaatactgggttattaggaaggagggactacgaaatgcgttcgtcatgtttttctgtgctcgatactcgaccgcttggcgatattctcaagtacgaattatagtacttcagcctgaatgtattcaattacttttagcgttgctccactgttccaactgtgattccttcggcggcatccgtagggctacggtgaacacatacgtccgacagttgacgagttctgaaatattgcaagatacggttgacatcgcggagtggtggtctcaatcgttaccgactagtctctccgttggggctgagatcggagatagtagtcgtggaaacggggtagcgagatacagcgatagcttggacagcatctttgatctcgcccgcgtgtttcgctattcagttcagagatttgttatgggtatgccggtactcctccaatacttgcaaggtagattagttgccacgacgtcagacacccgagtcgccgtaagaatatcatctgcaaacgcagcgactaagctgcaaattggccgccttctattgaagaaccggcgttcgttcgcgctacaccactttgtgccaaactgagcctcgagatctcggacagctctggcgccagctaagccggtcgacgattctttccacaagtccggcacagtagccagaccccgcagaactttatacgttggccaatcactttgcacgtcactagctatcggcgaaactgacggcagtatcgccgtcaccttcgcgcccaccagatagaagctgaacttgtacgacagcagtgccgccttgcagtggagtcgacatgcgcattacgtcgctgaggctacctggaaccgtccgcatggtcgagcagatttgagctaaagaacttttgaaatcctggtgtagcccgtcgattttggcgttcaacaccggtacagctttctgaagacgctgttcagttggggcttccattgcgtcaaccgcttgcatagcctcacgtttaaattccgtgaactcccgggattgaaatatgatgtgctgccaaattgggtgcgttggtgcggatttatgcaagaatatagcatcctggaggatgaccttacggagatatttaagcaactcaagaaaccctccggccgcaagcgattgttccgctgttcctgaagcaatggcctgttgccaaacctccacctgcgaaaataccatactttgcaatgctaacgggggatcaacagaagctcgagcaacaaaaacgctcccaatacttggttcaaaaccggcaagtgtgcgcatcgcctgcctcggaagagatgtgaggtagaatttctccattgattggccgttccaccgacccaaacggcgaatttgggactcacttgcgcctcccaggtccgccatacgcgatccggatccgtgagttttagctttgttgtggacgccggcatgtttcaacgctgctgtaatagctgcgttgtgaactttgtacgacattggtttcgtgggattttaccttttttaacagctttaccggataccagtgctctgaagacgtgaagtcgggaaacgcctcgccatccacatgccaacgccaatacaagtaaaatccaagagttccatgggggcagatctggacatgcttattgcgcatacatgcactgacttcaatgcgcccgacttggttggttttaccctatcgcatcaccataaccagagccctgtatggcgtgtagccctcgttttcgagaacaatcgcgtgtaaggctgccaattccatcatccgcaccgactctcctctcataagggcgtagtggctcagcagaaaagcgaccgaatttcgcaagtgtttacctgaatcacgtgccggtgtccagaaataccgagctatctcctgaacttgatcgattgtcgtatagccatccagtagtgtatcagctccacggtcctcaaaaaaattccgcttcctctcatcttcttcgtactctgtcagcttcaatagggtcgtcacagcttcgtctcggggggagggattactgttcacttttgcgcgagattactgcttctacaggtcaaccatcgccgcaacataggagttcacagcagaacgtccgacggtttcaattatgtcgctgggtgtacttccactcttgtggcgcttggcccggccaattacgcgctcttgtagaaagagatgaatcttctcaccagtaactgtacaccgggtcaggtcattaatgctacgtctttttccgagcaccactctaagaactcctgttgccaactgcggtacgccctctgcgggttcttaggtcgaagggtagtggcattcttgtaggtccgctggaaggtccgctggacagactccttcagggcggcctgcattcgactctctgcctccgtgatgcccattgttaagctgttccctgcacttgggtctccttttcccgtgctggcttggcgcgcgtctagcggcttagcccctagccgcaagattagacgtaattttgcccaaccagcatctagaagacccctcgttaaataacaagttattttacccccaaaacgtgagatacctacaatgatttgatcgaaagccaccaatgctgaccggtcccggtccggacccctctgtgataatgttatacagcgccctatttccaaaaccagttgtataaaatttctaatgctgtccttctttctgcctttaattaacgcccgccggaggcgggagggtctagggtttgttctccaagggtgaggggggggggttaccgacttttgttagttctaatgggagtttagatatacatgtaacgggttgctgtaaaaagggcttgccggctaggccttcatgtagaagtttgtatgggatccacaacgatcagctcctgcattggctatacatgtagtttttgctgggcaactttttgtgggttctattgttggcttagccttttcattttcttataaacaagtactcactcagctaatacatagttgttttcctatctgttggggtcattccctcgagtagtgcgccgcgacccaccaaactttgcatgtgctcaggacgtgggcgacaaattggcagatctctgtcgaagtacttggcgagcggcgcagcacaagcaatagatgatctcttggccgtggtctagccatcgccatgacggataacgttcttgctagtgtcgagcttgcgaattttcagcgtttgaattcatgcgtagctagccttcgtgtaggcgtcttcaagatactttcacgcaacatcgagatcgtacataagcggagggggcgacgacaaaggtagcattcaggtgatttatgaagtttctcgggtattaattatgaaaagtgacactgtacagtatcaggtaccttttggtatggtaatgtatctatatatacgaaatcatctatataattctgggatagcagtaaccccgctgtggccagcccaacacaggttaattaggcggcacctcggtaactgaagccagtaatactgaagccggaaaactggccccggtaactgaagtttactgcctatgctctccatccctcaaatccgagacaagctcgagctcgagatggatggaaatcatctcgaaagttccgttttcgttgagtgccgcgagctgcacttaccgctgaagctccctaccagtccgcacgtcgttggtcagcgttactaggttgtcgctgcgcgcggtgagaccgtcggcaaagtcaactcaactattatttgacaggtaaggaagtacatcgcgcacttccagtgccgcgcttgcagcggaacacacccatgaaacgatccctcacttcatcaatcccctcgtacacaagcacctacagtacatgtactaagttgctgaaggggtggataaagattaaccgtgttgttggttatctggagttcccaatatgcagaatggcacactagctatcatgcagaagtgtaaatactgacgttcttagactataagagtgtagcccgtaggcaccccgagacgttggtatagagggcagaatgccggagaatgaataaccgtggatgtgttgcaatgaatcagcccaagctggatgtagcaggaaactaccagaggcatcggcgaagccttgctcatgtgtcctaagttgctgaagtaaattgctgaagtgaaagaaaaaacgtttgtgtgcccacaagatggcgttcgacagactaaaggttcacgaacacgtacaactgagggcttgcgcagtaggacgtctgttcttccgggcacgtagtgtcagtggccgtggagggcgagacacgagaacgcaggaacacaagcttgcttgcccacggaaagaatgggattgaggaggagaaaacctctcgggtgacaaccccctcttggttaaactatgctatagaaacctcagtataaacaggagcgatacttcaactagaagctccatactgaagtatagtcaaccattgcagctttgacgaacagcggagctcgatcagccactaccagttccgtcactccctcttcgagatccgccacgcagacaacacttatttgccagtgcaatcagtcagcggcagcggcacaccattcagtctctcacgcagtttgcagaactgcgtcgatccaagcggcttagtgaaaatgtctgcaagcatatccgacgtagggcagtagcgtacatcgaaatctccacgttcatacagatctcgcaccttgtgatacttcaagtcaacacctttaattttgtagttgccctccgtagccttgatcactttgatcgtcgactgattgtcttgaaacagcacagtcggatggcgtcggcggagtttcagctcttcgcacatattgtgcgtccaaatgatcatcacggaacactcggccgcagcaataaactgagcactacaggtatcatcttgggtaatagactgcttatggctcttgtaggcgtaagtacatccgttcatctgaagcacaacacccgtgatggatttgcgatcatccttctcactaccgagatccgcatcagcgtaagccgtgaaatgtaaatctgggcttacgggcttcttcctcaagagtccataatcacgagtgcccttcaaataccgtaacactcgttttgccatcacaaagtgctccttggtgtacttgccaagggttcgcactgcatttgcgatctctgggcacgtgccttgcaccaggtactggagacaacccaccagctctctgtagggtatgctggggtcattaactccgggttcgtcctcccccacaagttgagctacacactggacataccgtctagtatgcgtctccatccgactttctacgtcggaaggctgaagccatacctgcagcacgaactacctagctcggctgaaccgaagcagaagactcggcggaagccatcgtcctccagcgcgacttcgcgctggagcagcgggtcgagctaatggtccagctcggccggaacaatcgaggcggtctgggaggccgccacaacctgaggatacttcagagcgccgaacccagcgctctagaactactccacgaccggaactcggtcgtggggagacgcgagatcagggtcaacaccaagttgaccacacacggggcgtgttgccaccaccaccgccgccaattcgtgacgcacacggctcaactcgatggatagttgagcggattgttggtcacagtatcccgagaacgaacaggcaactggttcgttttcgtatccgttggagaggattccctcccaaccaagatacatgagagccacagaacgtcttgctcgaagacgtcccggacatggtgagggcatacgaagcccaccatgcgctacatactggaacgtaatgcgagcgctgctgttaacagcagcgccctaagacacttcgagggcagacataggttcctgcccccgcggcagcgacgcgcttcgcacgtagccgcgcatgctactcagcagcagagagattctccgctgcggtcttcaactacgacgcgctcattccattacgagcgcgctctcttcaaacgtcacgcattgaccaaacggtcaatggtggttagacgtgccgagaccggcacgtctaaccttgacaggggggatggtgtaacggggttacacgcacaagtggctacagtcacttgttactctaacagatgcgatgtctgttagaggtttgaacacttcctcgaccttggtgtaaggtacaccaatggctacatacatttacgaccaccacgacgggtggtccgtacacatttaggattcctattggctgaaagcagcatcttttagccaatgagtgacatgcatagcattggaattctgccaaccagccgttggcagattcctagtttagaatattacatctagaggaagtcagaaacataaaacaaaaattgcagttctcatctttaccaaaacacgcaacttggagtctttatcttgtttaaagtatactcgtggatctcgagtatacttaactcaagtaaaagaaacctacgcttcctcatacacgtgcgcatacgtgtaagccgtagtagtgagccaaggtaggcccactacaaacgaggaagcacgtggcttccaagtctttcgacggctgcgacgagtagggtaggcgcgagtgggcgtacacccgagtggctagagacggcgagaagatcggaactcagttcgtgcacggcaggtagacgtgtattgtagttagacggtagcagataccgcgactagttcatctaaataaaataggtgcggctgtcagtcggacacccaccggcgcggtgtcatacgttttgacatcgacggccagacggacttcagatcgcatcagcacggtcgcgaccaaccccgagcgtgtggggctaaacactttgcagtttgttttgctttggtttgctttcggtcggttcgaaccacttcaaaccaaaccgtgaaaccgtaatgaacctggtttgctggtaatttttgtttggtttgaactatgaacctggaggttggtttgatttgtttcaggcgtgacaaatccagaaaaaagcagtttcaaaattgtttctttttttactaaacttggtaacagaagacaatgctgcaggctgcagcagaatagtaaatgagcaaaatatatctcacgcgaaaagaaaatagataaacagaagacaagcttcggtaaacaccaattgatctatggacaacaaacaaagccctacgttcacttcttgcgctaagtaggcccacagacttagaagttgtacttggatttcttgttctcgagcactcggcgcaccatccagccgtccgtgtcgcgcatagcgtttgaagtgagcgcgtccatgaggcacggcttgaagttggcaggcttcggctgctggtaaaagtccggcagtccgaagctgtggccaatctcgtgggcgacgatcgtaagctggtcgtcgtcgatgtgcgccatcatgtcttcgaggtccacctgctggaagttgtaggttccccagccgccacccagcccctgtgtcggctggaggtaggcatcgtacggcttaccgtcgcaaccactacctccgggcgacgagccatcgaccgagcggtagcagctctcggggcactgcggggctcccttatcgtcaaggtcgccgatgtagatcttgccaagcgagtcgtccgaccactccaggttggaggcttcacgagccgcccagcccacgatgttgaccttgatctcgtcgtacggccagcagttgtagccgatgagccagtggttccacagattgtactggcgggtcagcatggcttggaacttgctggcttgagccttgctgagcttcgtctccttgctgtcccagcggatgcagtaattgagcgtgcccttgttggccacgatgtggtccatgatccagttgtcgtagggctccacctccgccttcatgcggttgtcccaaatccactggaggtccttcgtgctgatgtagctgtccggatcgcccacgacacactcactcgacttggacttgatggttccaaacggagcgtgggcagcggtgctgttcgcggccgtagcgggcgaggctaccaaagcggtggccagggcgagagcggagacgctggagagaagacctggggccattttggataaatggagaatgaggtgttgcttggcaatgcgaagacgcagactcgcaatggcgatgctacgatggccttgacgtttctggcgaccttgatgcagcctgcatggtgtccataaggtgaaggagcaagacgattccactgataacaacaacagtacgaaccgtattcgtgtaagtgtgtaaggtaaggtgccagtttcgtgcctacaaccagttccgtgcctacttgttttagccaattagcatcttctccttgtcaaactctcgtagtctattggtagatttttccagcgtcacatgcaatttccggtgatgagcctcctaaaaaatgctatcaaaaagaggcaggaaactggcagctcactccaaaccaacaagcttttcaaaacaataacaagaagttctgcaaaatttacacggcccagcgtgaagtacataaattcagcccaatcgcgtagatttagcgggtgcaatcagatttcggaatggacaattcaatgaaaagttatgccacagcaagtccgcaagttcgaaggacggcacgaaactggcagaagaccttatgaatacctttgtccaggtgtttacacggactcaaacaggtgctggaagcgaggggtgtccgataggttgatcgctggttttgaatggacttactggtggtgcgtgagcctcgcgcatccccaggatacaactgtcagagaacagcagaattatagaaagagcgagccggggaattgaagccaatacagtaccaaattccgctggccacgtttgtagtggtacatggtcgttagcatgatcccgattattaattcaaagcatcctcgaccatccaccatataaactacctaggtagtgcaaacgcgtgtgccattaaagttcaaaataatggctcaatggctcaagcgaattggtgccggttgtcgacacgtgtgcgtaccacggcgtaaccagagtaatctggtacgtgtagtaggatatcattattgattaaaccgttatgtaagccgagagggaggacttttcgtaccagctaggtttcaccaactaagaagagtctcgagatgaatgactaccgtctaactccgcaactatggtagccagattcactatacactaacaaacagtttgcaaatgctagtacgaatagtgggttgtgcgaacaataccgccatctagagaaattgctacaaaagtgacgtggggcacaagagcaaccgctccctgagacacacttgctgtacagtagtgggtttggcaagtaggcgtcgctctatcctggatagtttcaacacgggcagttcggtcgagccgctcgacatcgactcaagcgccacaaattctcatcaggtgtgcgttcggctgtaccgaagtacttgaactgtatggcgaacgcgcgcacgctgttgttgtcatttctgcatcgaattgttgtgtacacatgcgcatgcaccgcatgtcaagcctatcatagccgctgtttccagggaaagcgtgtaataccagtctaataatagcagctgattccatgcgaagcaaagatcacgaacagcaaactcaatccccgaatactgtacggggaacggggccccttttacagtccgttaaccgcttacagcgagttatcgttctccgcagcccaagacgcttctaaaatctgtagcattgctgtcaattgtaaaatttgccgtagaggagtgagtggaaagtcggattgtcgattcaattataaacattgaattgaattgcattgagtacgatatttttatatgacgaaacacaaaaacaaaagccttcgatactgtacgcggtccaccacaccgctgcccgcatccagcaagccggtgggcactgtacggtgtcgttgtattcccctgagatgctgggaatccccaccactattcacttattaaatagtggtggggaatagtgactattataatacctcacgacttcgatgccacgacaaacaagcatactagttaaaaaatgccccgactttgctgtaggctcattgaacaggttgcagtgtaatcacaaaacgcgaaagcaactcaaacaataaagcgactcccatcttaggtcctgtgcctggtataggagagttgcagagattaatgctgggtaacccagtggcatgtgcaaccttgtcgtacagcaacagtctgcccgagtaaggaacgcctgatatatataaagacgcagaatatataaattgatgttaagttgagtatacttttccaatgtactgatttagttatttcaaaatgaactgaagagcagctttacctacgagtccggaatgattccaacagtggcgtatggtcgaagcactaacctttgaccaggcatcctcgcaccacaacagcgctgtcaactggtcgacctcgtagggattatctagcccttcaccaagccggtctagagcctgcatcatcttgcgggatagaatgtgtcgcttaatacaatgaatgattccttggtccttctccagcggccgccccagcaggactgcacttgacttgattatgcggcatatcgttgtcttgcctggggcggccgggaggctgaactccgtcacagcccactcagccaggcccctgtaggagagagcaggtgtgcgggctgccttgtcgaggatgcccactttctcagaccaagtgaggcggagacgcttggacggtgtggacttcatgggtggagtgggggaggaggtgggcttgtggggcgaggtgcaaaagcaaaagtgcgagtctaccactacggtacatgtagtttgaagtctagtaagatcgctaaatgcgcgccatttttcaaacgagggtggagagctgatgattggcactggatttttcaccttagtacctcagtaccttgcacatccccctatcgccacatcgactgaaaaataatataaaatatgtgaggctattagttgtacacccgttccttatacccgttccttattcgggcagaattctgtacagtacatgtacacgttctatataccttatgtgcttactgacgttcagtcattaccgacaactctatgagccaatcatggactttcaaatattgtaccgttgtagtttattttaagtccttactgacagcatacaaatcacaagtcacaacacaatttatgttttgcaggtcacttttattctgagtcgtgggatggtgtcttcaataaatgtgcttgtcatagcacacgtagagggggtgttgcgatttaggaaagtgcattgcttcgtttggatgagtcaaatgacaaaccaacgcctcctgtagcagccacaaccagtttccttaagatggcgccaagtagattaccagtgcttgtcgcggcgactctagccgcgacgtcttccgccgttgactttagcggtcagaatgacatcacgcaggcgtagggaccgtcgcccccggtgaggaaacgcagaccgggacgaatagcttcaggggctccgagttccaaaaccagtggacgcagacagcgtcttcctcgaataacgcgcccccaacagcctcgagtggagactggaaccagccgatgacgacggaattcccctctgtttggactccgacgagtgggcaggccagcggaaccggatgtcgccgccagcgtcaacggagactccgagtggagactctagtggatacgctaatccaccgcttagcgtggactccagtgggtcaagcgaaggtggatgggacgaaagcgtggaatgcagcgggtcggacgatgatgtggactatgggagtctcgagtgcagcgggtcggacgacgaagaggaatcgcagcagtcggtgccgagttcgactgggggatctgagaactccactccctcgacgacaacaacgccgacgctgacctctagcggagaaaccgatcaggaatcatttcagccgccctcgatagcttcttcatcggatacatccacctccatggcctctggtactgtcgaaaactccagcccggcgacaaccacatcgagtcaaactggagccgaggaggattcgtcgcaggcaatgcaaaattcgtccaaaacttcctcgtacgagagtgcgtcgtcgttatggcgccagagcaagacaacccggcgcaaacgtcttctaacagtacctcaagcgctaagcacgccccattcggagccatcaagtccaagtcgggtgagtgtgtcgtgggcgacccggacagctacatcagcacgaaggacctccagtggaattgggacaaccgcatgaaggcggaggtggagccctacgacaactggtcatggaccacatcgtggccaacaagggcacgctcaactactgcatccgctgggacagcaaggagacgaagctcagcaaggctcaagccagcaagttccaagccatgctgacccgccagtacaatctgtggaaccgctggcttattggctacgactgctggtcgtacgacgaagtcaagatcaacatcgttggctgggctgctcgtgaagcctccaacctggagtggtcggacgactcgcttggcaagatctacatcggcgaccttgacgataagggagccccgcagtgccccgagagctgctaccgctcggtcgatggctcgtcgcccggaggtagtggttgcgacggtaagccgtacgatgcctacctccagccgacacaggggctgggtggcggctggggaacctacaacttccagcaggtggacctcgaagacatgatggcgcacatcgacgacgaccagcttacgatcgtcgcccacgagattggccacagcttcggactgccggacttttaccagcagccgaagcctgccaacttcaagccgtgcctcatggacgcgctcacttcaaacgctatgcgcgacacggacggctggatggtgcgccgagtgctcgagaacaagaaatccaagtacaatttttaactgcaatcacgtcttcatggggaaaggtggtaatgcggagtaagctttttacggtttttgcaagcaattttttctttgtcgctgttattgtgaaaaccgcttcttttgcctattttggttgtaaatctatcgcttagcagcctgatttagctcgatcgatttgtaaatcgatcgcgtccctgctaagcatatgtgagtgggtgtacagattagacgaacgattcagtcaatatagacgcgtttggagcagaatgtccaccttgtactgggcaatcgtgcagcctggcgatgtatatggatcacaaattgtgattcacaatggatttaaaccctgatgtgtactctgattaaccctttgagtaccacccgcttggtagtgacactatattgcgttttagggtagccaataggatatctagaaaccccgtttatatgaccaatcacgcacagctctctgcgcttccagatcaaggtaaaaagaggcttcgagtgccaaaatgtcggataaaacgttgacacctgattcacgctgtgcaaaaatagtctggctttctttctccccctacagactttcactcgccatggatgtacgatactgccactactgccgcgcgataccgtgcgattgggagacgtacggcagcgagctcgttgatagtctaaggcgcctactcgacacgtacaaaaaaatcccgcaccctcacaacgtcagcaaggcgctctatcaagtctactactacctgaagcatggtcggctagacccagaaccaagctacagcatccccgcctgcatcaatatcaaactacaagaaggtacatacatgtagtattgctgtcggttggatacatgtaacttgacgagtttgtgatatgtagctatccaggctcagggtgaagacaagctagttctctgatagtggtgggctgtatgaatatgggctgacagcgctacgctacaagttgatgtggcttatttcgatatattcgaacattctaatcaccaacattcttcgtgttctcaccgattatcgttctacctgtagatgcattcgccagtttgatcgtgattgggatcggcattctgtaagtttgcgctgttgatgactgctcttatgtctatatggtattctactacatcaaagtacatttctattaagtggatcgtgaagcttttccaatgttcaggatatcagccaaacgggcggtgggtcgaactaggcacttggaattgcacagccctcggcagttcgtgcgatggcatctgcatgtaccccggcgtctccaacacttcctccaccctgttgacttcgtcagagccagtgttcgaattgtacagcgtctctcgttggattgatctcccggacaagactgacgagacgccgtccacgattattgttcggcacggagacgtaacggaggtgcggctgctgctgagtcaccactcgctcgtggccactcctgctcggtgctgctagtgttgtttcttaccaagttaataactcttaataactggtattagtaattttaggcatttaataacgatggtattacctttgtgtatcatttgtgtatcgtaatacttaaatattgtcttaagcattttaacttctggaagagcaagcttttgctcatatcagcttcccacacaatgctagcctgcacgcgcgcggtgcgttctccggtcccaggctggaatctctcccctaaatctacgcgtcgctcggcaccagctcgttgctcggtcaggacgtgaacggcgccggcgccacgctggccacggggctcgcaaaaataggcccaaggtgctctacgacgcgtacatcgccccacattcaagctgatcagcaacggctccgcaacgcagtagtcaaacgcccgctggatgtcatcaaggaagccatcgtgtacctgcacttctgcttttcggcccgagacgatggactgcgacaaggccactcagactgcttacagaagatctcttcacgcgccatgctagtggacatgacggagaccgaaaccatgacgctcggcctggccctcgcggaccccatgtatacgtcgacgggcgacctgcaggtcaacggctcgttcaccaaggacctgcgcttcttcagtggccagaagtcagccatgcacgcgctccgtgccgccggtgttggcgtctacatcatcggcgcgtcacccgagttgtacaccgttgcggccggcagttacttcggactaggcgacatggtgcccaaggagaacaggtgcggcgtgcgcttcacgacggacgaggccgatgcttcactgctgagcgacaggacctgcgagttctttggcactacggtgtccggcaccaacaacacctatctcctgcagggcgggcctagccgtcagtacgtggaccacgtcacgtgcctgctggccgagggattcatcaaaaataaagtaagtgccgctgggagagcgtgtagctggatatggtggatctcatgagtttgtgtgttgtgctgcagattcgcaagagagggaagggcttgaagagtatcatatacatcgccgaggtggccattatgctgttacatgaacgaacagctcgctggtaagggttggacgaggcctaaatgttgcgctacaagcgttgatgttacattattactgcattcttaaccaaatatgacgcttctttttttgtgggagtgctagtgcgcgttctgctgtaccaatatgcgccgttgcgctggcagctcagtgacagaagttcaagttgaggtcatctcgtagaagggcaacctgtttcggcgggtactgcacgatgcactgaatatgtgagctaactgatgtgaagctctacgattataagaagagcaagaagagctggcgtttgcattatttgaactcggattagtcagggcaaaagcggtttagccctccacctctccttcacccctagcaagttcgccaccactaaggtcaccaaagtgttctgcgaccgccatggccacgggtccacacgcagcttcaccacgcacaagcacagaaaggttgtgtgcgcgctgaaacagggtggtgaggccggcaagagcaaatcgaacatcctcggctgcgtgcatgagtgatcaaggctcgagtagcgcgacgacgaatatgccgtcacgtccgacaagcaccatcaagtctacccctatcatgaacaactacccaagtccgcagcagaaccaaaactcctcacgagaaaatgaagcggaggaagctgctagaaatatcatcagccgaggcagcatctagaagaaattcgaaagaggttgaagccaatgcattgatacacatttgcatgaggacgacgactctatttgactaactagtgcatgatatgtaatcaagaaggcgtgaacggaatgaaaatatggatcgtgttgcgcgtgaacaaagtcaaatatgctaatgctcccaggttggaccaaacagcaccctcggcgagtggtgggtgcgtccagtgctcgactgtggagttggaggtagtccacatgctaccccctgaaaatacgagacgatcgcaagttggttgactcggtgttgttgcacttgccgatccgggcggcctcacgaccggtggcacaagctggcgctcatcagcacgcgtgaaaacggttccgctgcttgttgactgcgtaagtgcgaccgactgcgtaggagcgaccgactgcgtaagagcgaccgcagcctcgtcactgcatactgtgctggtattcgtcgcttggtcgggtagcgggttggctagcgcaggcgaaaatagtgttcttcgagctagcgggggtgggacagcttcacgttggtcggtctgcgagggcgtgaagaatcgtgatcggtgcgccgtattagaccgactaccgcgcatgcgactggagctgttgggagcaattgacgcaacgatgtcatcatcgctgtagtcgtcactcgcgctgctttcgccctcttcttctgcattgacttgatagtgcactgcactagttgcagccttgtcacccgcattcgagtacaaatatgctagcttttccacgcgatcgggtttcagccgatttcgtcgcttggtgcggatgaaggagtgaacactccacgagcgctcactcgcagcggacgacgtcgggatgctcaaaacgcgggtagccaaaacatgtaggagcggaaacttgttaaccttgaccagccaccagtctaatggcgtgtccctcgcgtttttttcgtggtcttcggctgtccaggacttcttcacgcgaataaaagccatgacagctcggcgaaccgcatttggagatacgttggagggtagaccaactcgtgtagctagatctacgcatgcatcgactgcattgtccaaatcatcaccttcaaagtcgtccgtagacttagttgggtccagtaaaaatgcagcgaggattgattcgcgcttgaggaagttccagcgggagctaatctggcctcggatcgtgttaagaataccagaagcaacatcatcagtttcgcggttgtagatgacgtgggttttcagtccacgaaagtattcatacaccatcgaaaggcaacacccatccttttcgagagcgccgagagcttggattatcgggttcgtcagtcgcattacggctctggcattcacccaaaacatgctatcagccaaaatggactcgacgcgattgagtttggcagcagcatctccgtaacgagccagaaattcatggttggaaaacaactcacgcagcacatcttcgttcctcacgacactggaaatacaatttgtgctcgagtaccacagcgtcgaaacagggatgattagcgcgcgtcgtcgctgccgggtaccaagatacttgcgttgcagagcccgaaagcgataaagaagcgctgcacgtttacgcacaaatttggtaactaggacggctttcttgaagacgtcactcatgagctccatcccgaacatgtctttgagtagaagattgatcatgtgtgccgcgcagccgttacacgttagacttggtatcttggccattagaagctcccatgacttacgcctgttagacgcgttgtccgtcacaacagcgcatacggatccttttccgacgacattttcaacagcttgaatcaacttgttcaactctgacgccatgaactcccctgtatgttgtttgtcggcgcagcgctccgatgaccaaaatatgggtcggataaatggagacgtcaccataaagttgataatggactcgctgttgggatcggaccatccgtcgcatacaatggcaacgtactgctgctccctcagcacctccataacgctgacaacttcctccgcgtacgcgctatcaagcagtgaggtcgccaaatcttggcgtgaagggagcgtcattccgggccggtacttcgtcaggatacacctcatggctccattttcgatgactcgaaacagaatgccgcaggcatagaacgctttggcaatctgaagatggaactccttttcagtcactgagaccggtcctagcacactcgtagccatttcaggccgcgaacgcttggatggactgtggggcctatcggaagtgtcgggacgatctcgcttggagggtgttactgggtaattagcccggacgtccgctggggcgcagggacagctgcgaatgtgtgggcggaggtttttcttgggctgggcattcttgatgagcttggagcagtgcgtgcacgtcacgtcggggtgctgcttcttcgggttggcccaacgtggcacaaccacaatgtactcggtccacacgccaactgaagggcgaccaaggccagacccttcactgctagcccggtcctcgttgcggtggccgttttggtccatggagcttgcaggctctacaggagcaagtttgcgaatgcagcgacgagaataggccccgtgcgcgagctgcctgccacgtggagcatacgcagattcatgtcggtagacctccacgtacgttgacaacttcacgaaacgcgttgaccgaatatttctgccacaccaactatacacatgaggtattaccgttagcagatcgaatatttctgccacaccaactatacataaaagttattgacgttaataaatggaaagtacgaaggtaataacggtaactggtaatatctggatgaggatttgaccaactctagacacaactactgtatccttggggcatggttgagagagttacccgtgttgtgagaagttggctacgaatcgatcattcgcgacggcccgtagcccacagcatcgcgccaattagatagttaagctagttacttccagaataccaagatcaaattggcgactttcgtgattgctacagtgtagcggtcgaattcatctcccacataacaaaacgttataacttctttactttaaacgatatcaatattatttttctattgggtatagagaagaaatttcgtatagtaccggttagtttttgtcggcaaggctgcagcagttctgacactctgtgcccagtcaaatcgactgttctgaaacaggccacttatcttgctcggcttgttgagcaagtcatatagctacgctgcgtcggtcctacttcgagtcgctgcaactctaacaccctctggtcgacagcgatactcaaccgctgcacccgatcgtccgccacagtgcgttcgaccgaatttattaggggggtatgcaaacctcttctaccacgcaagttactgtcaacctctagtcagcactaacctacgatcccgtctcgtgttccacgcagggttcccagctccggccagtcactcagtcagcgcttccgtcaaatcctcctcggtctcgtccttgtagagcttgcgctctgtcgcgtacgtgtccgtggacccgctcgtcttgccctcgtccgcgtgcgcgtccgagtctgttgcctgctgctgcttcggcagcaaaatccgttgtgtgtggcctcctctcgctgccgcagcccgctgctccgtccttcaatgtcgactcaataggagtcaccaactgcagctcgctcgagctgcttattgtgccactcttggacgcgtggaccacacagaatccgccctccgccaccgtcacgacctcgaggaccgcccccgtactgcctatcgtggacctgctgtcgtgctccttagccagcggcttcgtgtcgccgtccgtcaccacctccagcgtctcgtaggtatccaccaccgctgctgtttgcctcatggggtccatctgcccgggccccctgttacagctccatccaaaatcaaccagcaaatggtgtgggtgacccattgggtcccgctaaggacctggacagatgtattgaatgaagtatattcatgcgcaggcgaatacagcagctcgtgcggttgttgtatcgcggcttggccatgccctctcaccttgaggtatcacgtagactgcatcaaatacccatagcctcaccacagcgtgtctgcgtcttgcgtctttacatcgccaagaaaatcttcattctgcattcatccacgatggccccaagtcttatttccagcgtctccgctaccgtccccacaaccgctatggttgccacgtccactgaggccgcgccatccgtgaacagcactgctgcacacgctcccttcggggtaaagtccaagcctggtgagtgtgttgtcggcgacccagacacgcacatcagccccaaggatctccagtggatttaggacaaccgcatgaaggcggaggtggagccttacgacaactggatcatggaccacatcgtagctaacaagggcacgctcaactactgcgttcgctgggacagcaagaagaccaatctcagcaaggctcaagccgccaagttcgaagcaatgctcacccgccagtatgctctgtagaaatgctggcttattggctacgactgctggtcgtacgacgaagtcaagatcaacatcgttggctgggctgctagaaaggccactgacctcgagtggttggacgattcgctcggcaagatctacatcggtaaagccggtggcgcggtcgagtgggttaagcttctggcccttacgctatggaccgagggttcgagccccacagcggacattagtttctccgatcgagaagtgtatagaacccccgtagaggaacgtccctcatggcccaggcggttagggcaccctgacactaaggggaaataaacgtagagaacagctggcttataggaaggacggtttcactttagaaagtaacagcaaggacctcggcggtacgagaaatgcccgtatccacagaccccagatgggttagggggaggaataattggcctatcagaaacaaaatccatcctggaaaagccacttgcttacgaagaagtgtaggtaaaggtacgcgctaagaaatccccgcactgtgacacataatgaggcccgaccgtccccacaagggaaaatacaaactttattggcctatcagaaaagatctacatcggcgatctcgacaaggacggaaccccgcagtgccccgaaagctgctaccgatcggtcgataattctgcggcgagttattgggactccagtaactgcgatggcaagccgtttgatgtctatctccagccgacgcatggattgggcggtggttggggagccggcaatttccagcaggtggacctcgaagacatgatgccgaccattgacgacgaccagcttacgatcgtcgcccacgagattggacacaactacggtctgccagacttttaccagcagccgaagcctcccaacttcaagccgtgcctcatggacgcgctcacttcaaacactatgcgagacacgggcggctggatggtgcgccgtgtgctcgagtacaagaagtccaactacgacatctaactttgtggtttgctttgtccaaaagaccagtcagggtctttgtttgtcgttaatagatcaattgatgtttaccttgcacgttcttcctaaagggggcctcacaaatattttttgacaaaaaagttgaaatataaaatcaacgcgctctcctgaaggtgaacatctactgactgtgttcgttatgaacaacgaacatggtctttgtgtgcttttcttcatgtagtttctagacgtagcgcgagtcagggccaatccacatgcttacaagtgatagttgggcttcttgtttccgagcacacggcgaaccatccagccgtccgtgtctttgatcgtgggtgttgagagcgcatccatgaggcacagcttgaagttaagaggctggggctcctcatagaagtccggtagcccaaagccgtgacccatatcgtgcgatacaatggtaagctcgtcggtatcgaggtgcgccaccatgtcgtcaaggtccacctgctggaagttatagattccccagccgccacccagattctgcgtagcccacagagagatgtcgaaaggcttgccatcgcagctgctgtacaccgaccagccaccgggagagccgtccaccgagcggtagcggttgtcgtggcactgcggagagcccttatcaacaaggtcgccgatgtagatcttgccgagcgaatcgtccaaccactcgaggtcagtggcctgtctagcagcccagccaacgatgttgatcttgacttcgtcgtagcgacgaagtcaagatcaacatcgttggctgggtcttcttgctgtcccagcgaacgcagtagttgagcgtgcccttgttagctacgatgtggtccatgatccagttgtcgtaaggctccacctccgccttcttgcgtttgttccaaatccactggagatccttgggactgatgtaaggcttggacttgataaatgggtgcccaacgtacgaacggcaaaatttatgctggaagtacagcgtaggcagctcggtgctgttttgctctgttaaagcacagtacagacgacatggcacaacgtggtacatggaagcacatcgaagacaaaacaattgataactgacctggtcgcctccgataataccgagtaccggtattctcttacatcaaccaaacgctcttcgtgcgccacaagtttcttcgtcggttgtcatctgacgtgtgtcggcgacggaacagcgaatgttgtcagattctcaatcccaacgttagatttcactacatggataggaagagaactccattgagtcaactactaccctcgtgttggtcgaaggcagcattcaccagattccaaattttgaccggtcgcggagaagtgtcagaggacgcctccaaggatttccggcccttggccttcctgggaggaatcctccctcgggatcacaggaaggagcaagacgacagcaatggcatcttcaaggtggccagggtcgacgaagggtgtcgacctcgtggcacaacaggctgatcaagacggtaggcaaaacagaaacgaaaagcagggtgtattggtgacgacgaagcgcgagacggcggaaagtatgatggagcacacagcacttcttaacagaggaagcaggagtatacaaactccaagtgaacagccgttcacgtgtccttggtctgaaggggacgacttgacttgaaaagcggtagatctaagactgaatgtatttataggttggtacagatttggcctgcatacaaatcctaagttccctatagtttgtgtcatacaaaacgtatctgttggctctgaggccacttgggtcactatccaggggagtgaccgatgtagccatcccggaatagtgacagggtcactattccatgtaaccccgttacagaaagagtgcagactgctggccacgcgatcttgtaaggctatcgtggcgtcaggatcgaattccgacgagcgcggcgcagaggtgaccgctggattgacgaagagcgagacggaagagaaggacaagagggaacaaaggtgaacaacgtgttggagggacgcgtagaggtggtggactccggaccgacgaagcgcgaaaaggaggggttgcatatcttttttagcaattgcatatcgtaggtgtatatctgggtcgaatgccctagtggcatttggttggtgtatacccgtgtgtttgggctactaccgcgggcggaggcccgtgatccgtaggcgaagctgcagcagtgcgcggcatcgggtgtagttagccgtctaaaccgcaacaaattcaaattcaaaagcattcaccactgttgaccctacttgggggatactacgtcgccagagctactgtacttatcagcaacatgggtagtgcatgacgctgtattcctgacgacaccaatggtctctacatttctgaacgaatatttgtagaactaaaagattttaccaaatactccccatactagtatttattagatccccaacaaaatggtcgttggtagcatgagagttgatatacatatgggtgaggcctctactagttatcgaccgcattgcacagtagtgtactagcggatctagcgagatagtataaaacgtatgcgcttatcgtaaatcttaggcaatacatctcatatttttcagtggcacagaacgtactgtacagtaaaattttagtaaatcgatgctattgcctagtgtattcaagccaccgatcctttacacgaaaagacgtgtgctatgatagccatgtcgtcatgaccgtctgcagagcgacgatagaattgtagcgggggaaagcggaacgaaatgatccgcttacgagcaaatgtcgtgggtcgtctcgacgggattcatccgactctcctttgcttaactttaagtaacagatcgagggtgaaacaggcgtgcgctttaacgtaaactgcttgaaaaaccagtccgagactaacggcaaatttatccggggggcagtggattctagcatagatcattttttattaatattgtcagacaagctggatgtggtacatgtatgcgcagcgttggaagagccattgcgtcttgtgttgttggatgaaactgaggcgacatgcaaacgcttcagtacccctcttcgcctctcagacactcgctttccgatactgtagttttttattaacccctctaaccccgtattatgtatcctacagaataagcattgtcacaggacataatatccagcaaacttgtcctctctttcgaacttcgcatatggatgtttgtatagccggtattgtgcacatcttcctgttagattagcgatgggaagataaacggggtttattccgcggtaatagtcggacgagtataaaccaccaacaggtttgaaaattcgggtggaagcctaaaaccgccgcgtgctagccactcgtactttccttcattccgaaactgcgctgttcaagacgtcgcaatgcaagctttgttggagcccgtcgagcgcgcccaagtggccaaggaccatggccgaagacgatcatgatgagcgccattgtgatctacaggtaagcgagagcgtgtactttgctctgtaacattgtactagtggtatattgattctacgttgcgatgttgattaccaggcctggtgatccgacccagacgacgctatgagctctcgcgtgtggcccgattggcagatcgattgcggagtcagcgcacaacctcatcggttcctacgaagccggctacggccgggtctaccgctatattgtagctgatgcagtggctacccaagaggctacagaagaagcgctcctcatggtgtggctacaccggagactacagaagaagcggtagatgctacgacggatgctacagaagaagctctccgcgtgatgaggttacaccggagattacagaagaagggacagaggctacgacggaggctaccgatgaaagcggcaggaatggagcggcagtgccggaggctacagagcaaagcggaggctgccaaaatggcgaagatgacccacggctggcgcgaacattgaagagcgtgcgcatgtaaaggaagcagtagacgttggcatgaatatcatatattgtcctgtttcgtacaagaggaaccgtgtgtcgtgcgtgtcattacgggctattgagcatgcaagctccctggtgttgttagagagacaatcgtaacaagcttgttaggtgggctaaagaaatctaatgatgcgctaatgtcaagcacaaggaagaattcgcccagttcctcctcactacgtcagttaggaacagggcgatttcttcctccgcgtttatcgcgacgtgccgaagatgggtggctggagccgaagtatgctgcgttagcagccttgcaaggtattaccatgtagcaggttttgagcgtgctctacgctcgccacgaccaatagaagctcgccatttcggtatatggtggatacattgagcatgttttgttcactttcgttgctgttctgtggacaatgtaccctgcgcttcaccgcaagatgcgaaagggcttccaacagcaaatctttgacaggttttgaagtatactttaatcaagtctaatgtttattctgtaggatacagaataaggtctggggctagaagggttaaccaataaaatgtcataaccaataaaatgtccattttgtttcaaatcccgaactgagaccaatgcccgagagccccgcacgccggcgcgggcccaagccgctgctctcaatggagcaggagaagcagctggcgcagtgggtcctggcgcagcagagctcaggtcgacgagtctcacgtgacgacgtcatcagccaggctcgagaaatatcacgactggatgagacccaagaaggagaagagacgaagcccagccaatcggttggcatggggtggtgcaaccgcttcgtggcgaggcacccggagctgaatttacgctccggagctgctgcaatagtcaagacgaaaagtaccgactcaaatgatgcaactgtaaatttcacgttaagtggtggaacgctaatggatgcagcagtggaaggccaagaagctgagagcttaaaggtttctgagccttcggagcaattggagggtaaagaggaagacacagaggctgaagaagctgctgagccgaccaagacgaggaagtacaaccgcaatcatatggaggcggctgtggagatgtacttggctgggaaatccatgagcgaggtgacgcagcgcttcccgctgttgcatcaacggactattcgacgtcgagtgttgcgggtgcaacggggcgaagtggatcggagacgaggaccacgcccgctgctggagggccaaccagagcaggagttggtggcatggattctggacatgcaatgtcgaggaacgcgcgtgaccaagaaggacatcctcgcgagagctaatgaacagtatcgagcgctgactggagagacgaccgaggatcgactgaaggaaggatggctgcgcagattcaaggagaggcaccccgtgctgtcgggtcgcgctcctactaaagtgcgccaggagggagaaaacaactcgcagtcaagtacagaaagtgaaaaggagttttcaagtggtgcagacggcgagctgctaggtagcgcacaatcgatgggtggacaacagagaataatgtctggaggagaagagaagcaagagtcgcagaagcgttctgaggctgctgtgagtggagttgaagactcagcagcgtcgtcgaagaagcagaagacggaagacgcaccctcaactcgaagtcccagagctgtagctgctacgagtcacagtgatagtgctagtggggtttcagtcttgcctgagcgacgccaagctgaaaaagctgagaacgtgcaatccaacaatcggctggaagaaatgcagcgtcagcagctcgaaatgctccagcaactatgcgcgtcaaacgatgtgctgtcgcgcattgctggctcgaagcgggtattcaagagcaccagcacagaataagcacgtggatggcaaccgtctctttttcgagctggataacgtcgcttcgcggtcgccaaaggatcttgtgtgttgccatgaagggctgtcttctggtgttggtgtgcatcctggtgtgctgtgcagacgccgaaactctgacgtcgagctgcatgcgaacgtgtggcgagttcgagcagtgcttcgtgtacaaggactcggagttctgcgctgaagtgtgcgcccccggtcggtgcaacgacgacaccgaaatgtgcacgttgagaggcgtggtgccgtgtacgaccgagccgtgtttgcctgaagcagtgtgcgagcctcgagtcacgtcaatggtgaccaactcgaccgcagcctcgtcttgcgagctgcgttgtcagctcataagctctccagtgtgcggctccgacggcgcctcgtacgccaactcgtgctttctcaagaaggcgcgatgcaccactggaaatcccgacttggtggtggcgtctcgagggatctgcgagcgtgaaaaggctctaaacgccaagtacaatcctccaccgtccagctcagctgatgatgctgcaacttgtttggctgcaatcacttgcgcggacgtgctgggtcctgtgtgtacgagcgcaggcacaatgcgtaacctgtgctacttcaaccgcgagaagaaatgcaaccaggcaacgctgtcgatgatccgaactgggtcctgtgaagactcgaatgtggtgcctctctgtccagcgacctgcacagacgagtacgacccagtgtgcgcgtccaatggccagctctatggcaacgactgcctatttcgccaggccaagtgtgcgcgacgtgaccagcttgcagtcaacatcgagccccgggtgctttcggagtgtgaagcgtaaattgttttccaatcgatataaagtcttttacttgctttgtttaatgtgttccgctctcgacttctccgagtcaaatcagcctacaaaacatgctccaaaaggtgacagcgtagtcctagctcgcagtggtcccatttactgagctccctgggcacccatggggttgtgttggtgcaggtgcaccgagttcatattgcctccgccgtcgcctccgaagcgcgggtcgtggccactggccagcggtcggatgccggagagggtcttgagctctgtgatgatgcgagcgcagaggttcatgtacgtgaaggcgttgccgtccagacgctggaagtccagcaagtaaatgtgctgctgcaccttgtacagctggaggccgatcttgatgcgctgcatctgctgctgcaacttgagctcgtccgggctcagcacggcgcccccgttctggttgttggggtctcctacaggcgactgccaccggcactttacgcggtacggcgccacgaccttccattcaaagtggagcacgaacagcgccttgtatacttccgacatcacgtgagccggctccttcttcgactgaatgcccaggtaccatcgtcgccgcttgggagtgggggctgcgccgtgcccgtcatcaaatccaggcatgccatttcctccggccgcggacatccgtggtgcttgacctgggatattaattcctcgtccaccaaaattccgagggtcaggcagcgctgacgagggcgtgaccaagggagatgccgccataggaaggggtcctcgtccagggagcagcaaagtgctaggttcgggagtcgagaacgtcttgggtttgttattcaccgttcgcacatcacgcagttctagacacagcaaattaacaacgttagattaagagagcagaaaataaatggctctatcaggcaaaattcagctggatgagatccacgagaagcaatggacgtaccatcaatacggatcttggcgttcttgtgatcaagaataagttcgtacgccacgcggagcgggtggttttctcgcctcttgagcaatgctactagctggtcgtggccgatatttgcggcgtaattcagagccaaacactgggacaggcactcctcgtcaatcttgaaggttttgtgttccacgatctccggcgggtgctgcaggtacgggggcaaatcaatctggaaccatgggtgttgcctgatctccgggatcgtgatgcgcttcatggggtccaccacgagcatgcgcgggatgaggtcgcgcgccatctcggaaaggtggctgggcagcgagtacataccgccgcggatcttcttgaacaggttggggatgctctcgtcgtcaaacggcaggctgccgcacagcagcgcgtacaaaatgacgccacaggaccacacgtccacttcaggaccagcatataaactgccggagatcacctcaggagctgcgtagttcggggagccgcacgacgtgcgcaaaaagtctccgtcctccatgctgttggacagcccgaagtctgcgatcttgatgttattgtccgcgtccagcagcaagttctccggcttgaggtctcgatgcacgatgcggtggaaatggcagtactccacgcccgagataatctggtggaaaaagtgtcttgcctcctccggcgccaactaaataacaataaacataaaacaaaaaaataatggttaacacctcacaaccacgacaaaacctcaacaacaacaaaaatccacacccacccgtcctttcgacacaatgtagtcgaaaagttctccgccggcaatgtactcgagcaccataaagatgtccgtgggcgtgtcaatcacctcgtacctagaaaaaaaatatacaccataaaataccgttattttcctggatccccctaataatttgatgcaaatgtggtgtgcatgtacagtcggatgatgtgagggtggcgcatcttgcgcagcagcgtgatctcgcgccgcaccttctcgctcatgtcgaggctgcggatcttgttgcggttgaggatcttgatggccaccttgtggcccgtgatgtcgtgctcggccactggttagacacatacaaagacgcagataggtccgtcggcaacaaattcacctaaacggggtggcaacaagtggctgaacgcgagtctctaaacgtctctaaacgtacgcttgaccttgccgaaggagccgatgccgagcgtcttgcccaggcggtagtggcctagctgcacggggatgtcgctcatggtcgaggggggacggggcgagcgtgcgctgggggcgggcactcggactcgttacgtgcgggtcggtcggcgctaatcggcttcgagtgtggcgcaaagaaaaacgggtcaggccggtatgtagtgtgcgccacaccaacggaattaccggttgtggtaccggtgagacgaggtagagaggtagagaagttggtgtgtgctacattgaatagtgagccctacagtaagtgcgaacccacttcagctcagcaccggaaaatatctggatgcatggctgcttcggcgacaagcaggcgtgttacagctcgctcggggacgcgggagacaacttcaagccgctagctaaggctgtcggtttgcgggcagctacagtatctatctagcgtcaatagcaagcgggcagaggcgttagcagaaatacgcgtgtgtatctccgatttgctcggcgctcttcgatcagcgtcatccatccgcccaagggtttctgcccgtttcgaacggctcgtgactcgtgcggtccgttggtgcgttcggggcttctttctcggtgcacgaacgccgctctctcttgttgcagctgtagcggtgcccatgagtcggcgaaggcaccttggccttggggcgttcggcggggcgagtgtcagtgttgaagtaccttgggccccgccgaagctcgcaatatgctgggagaacggtgtatgtcggcggaggatctcgagattttctttatattttcgacgctggctgtacatacgctgcagtacttgtagctactcattcgtctgtcttcgcggatgactcgcgagtttcagaactcgcgttttcgacttgaaagatctggcagaacgtggcactggcattgtcgaagcgagcgaacccaggtccggggacgccaggcgtggccacttgcttgccggggaggtgcatgcatgcgtggacactttcttgtcgagcacacttggccgatcggctcctccccgtgtgacggcagccatgagacgactgccgccagctgagcccgcgccgcggcggaagtggatttttaacatgaaacatcgggcggctgcaatgtgtatacgaaaacaagatctatggcggggtaactcagcgtacacaaaacaacgaggagcaaaaggcatgtctgcaatgcatgtttatcgtactcggcaaaatatgtgtaaagtgctagcggtgagatgcctctcgtcgcgagcaggcaccgccgttgcagacgaattttgtgcctctgccgcccgaacgatagaccgttctcgaagcgagccacttcaaggtcggtggtgccggccagcatcccacgacgagagccaatatttgtggcgctccatggcagcgcctgcggctcgcgccactcggtttcaaagcgagcagctaccgagtgtgggcgctacgagtccttatctgctgccgctatcagttgggctctctcgtcttgcgcggctggggagctcctatactttcaacgttgtggatcgcaggcaaggttgggattggagtcaataaacagtaccgtatcgtgttgcgactcgcaacttgcgagtgtactgtactacgtatgaacatcggctcgcagcgcatggtcgtcacggctgtcgttggcggcgctcgatgctgctgctgctgtacgcggtcgtgcctgcggccacgactatccccggctcgctgtgtatgtcggcgtgcgatttctccggcgtctcaccgcgaagacacgttcactcgagctggctgccgccttgtagctgggttgccaccactcaattcgccagcggtaacgctgctcgacgagcagaaatactatcctatttaacatgtatggatacaatatggatacaatatgtacatcgcggtgaaccggataataggcgatgccactgaatctgtggcatggcttactctgtgccggagtaatacttacttgcctagacttcgcggcctgtattcccaccaccggatcctcgatgccgttgggccgatgcagactgcattgcagttaggccgatgcagactgcattgcagttgggccgatgcacttgctcgtaaagtaagtattactccggcacagagtaagccatgccacagattcagtggcatcgcctattatccggttcaccgcgatgtacatattgtatccatattgtatccatacatgttaaataggatagtatttctgctcgtcgagcagcgttaccgctggcgaattgagtggtggcaacccagctacaaggcggcagacagttcgagtgaacgtgtcttcgcggtgagacgccggagaaatcgcacgccgacatacacagcgagccggggatagtcgtggccgcaggcacgaccgcgtacagcagcagcagcatcgagcgccgccaacgacagccgtgacgaccatgcgctgcgagccgatgttcatacgtagtacagtacactcgcaagttgcgagtcgcaacacgatacggtactgtttattgactccaatcccaaccttgcctgcgatccacaacgttgaaagtataggagctccccagccgcgcaagacgagagagcccaactgatagcggcagcagataaggactcgtagcgcccacactcggtagctgctcgctttgaaaccgagtggcgcgagccgcaggcgctgccatggagcgccacaaatattggctctcgtcgtgggatgctggccggcaccaccgaccttgaagtggctcgcttcgagaacggtctatcgttcgggcggcagaggcacaaaattcgtctgcaacggcggtgcctgctcgcgacgagaggcatctcaccgctagcactttacacatattttgccgagtacgataaacatgcattgcagacatgccttttgctcctcgttgttttgtgtacgctgagttaccccgccatagatcttgttttcgtatacacattgcagccgcccgatgtttcatgttaaaaatccacttccgccgcggcgcgggctcagctggcggcagtcgtctcatggctgccgtcacacggggaggagccgatcggccaagtgtgctcgacaagaaagtgtccacgcatgcatgcacctccccggcaagcaagtggccacgcctggcgtccccggacctgggttcgctcgcttcgacaatgccagtgccacgttctgccagatctttcaagtcgaaaacgcgagttctgaaactcgcgagtcatccgcgaagacagacgaatgagtagctacaagtactgcagcgtatgtacagccagcgtcgaaaatataaagaaaatctcgagatcctccgccgacatacaccgttctcccagcatatcgcgagcttcggcggggcccaaggtacttcaacactgacactcgccccgccgaacgccccaaggccaaggtgccttcgccgactcatgggcaccgctacagctgcaacaagagagagcggcgttcgtgcaccgagaaagaagccccgaacgcaccaacggaccgcacgagtcacgagccgttcgaaacgggcagaaacccttgggcggatggatgacgctgatcgaagagcgccgagcaaatcggagatacacacgcgtatttctgctaacgcctctgcccgcttgctattgacgctagatagatactgtagctgcccgcaaaccgacagccttagctagcggcttgaagttgtctcccgcgtccctgagcgagctgtaacacgcctgcttgtcgcgctcgctcgccaacggccggcgacgacacatctttctcgccccgcgcgccagccgggctcaccaccagcctgtatcgcaagtgcaatacaccgccgattgaagatcgcaaatcggcgagaactaacatctacaagacgacggacagcgagcgagcggagagaatccgccaccgcaaaaatgccatggccatctccaccacccgcttgcaagccatggtcacgatgaggttgccttgcgtgcggcgaagtccatcaaatttggttgacctccttcatggcacgggtgtgaatcgggcgaaacgccgtttcgagcttcgagcaccgctttcccgcctcattctaatcgctttcgaagggctcgggtttcagtatcgcaggtcgcctctctctttcccaccgtcaatcccacctgtattcgtctacttgacctcgcagagcatcaagtctcgcagtgcgcatcctggctttgttttgcgcgtgtctgactagcatggaagagccaggccgccgagcttgggaaaagcagtcgaccgcacgacgcggtcgccaccagcagcttccctcgccgacgcgggctctgcgccattatccttttcgccttggctgccgcgtcgtccatccgtgccgacgccattgccaacagcaccacagcacagcatacaggcgttagccatccatccatccatccatccacacaactacagtacagccagccatgagtctcaagcgaccgcagcactccatggacgagctggcctcgcccgagcgcagcagctccagcaggaccaaaggcagcaagagccgccgcagccgccgcacgctgcacagcgccgagtcgacgtgctcatcatcgtcgtcgtcgtcctccagctgctccagtgacgcgggtttgccgctggcctcggcgccgcgcaccgtcgagatcatgtggggcggccgctcggcgcccggcttcacgctcaagcgcaagcgcacgggcgccatcctcgtgagcaccgtgacgcgcgagacacaggtggccacgacgctcaaggtcggcagcgagctcaagctcgtgggcggcttccccgtgaaccgcctcacgctgcaggacgtcaagaaggtcatgctcatggcccccaagcccgtgagcctcgtgttcgtgaacgcagacgacgtggtcattgccagcgtggacgacgtggaggccgacaggaaggaccggcggtcgctggcctccacgacgctctccaccgccagcctgcgacgcagcgtgagcgtggacatgaacagcctcaagcgcgacgacagcggcgaggacagcgacagcagcgaggtgtccaccgtgtccgcccccgccttctacagcacgcccagcgagagcaacaagtccaagaagcgcaaagtctccacgctgcaggtggcgctggatcgcgtcaaccagctgctgaaccgtccggtgcggcaggccggcctgcacatcgcggccggcaagagcatcgtcgtgtagacatccacttgttcttcttcaaccacctgccaccaagctcttcaacatcacttcaacccgatagaaaagggaaaaacagcacaagacgaagcggagcgagcagcgcgcgagccattaggaagctcgacgcgggcctgctgctctgctccccccctcctcacaccgcagaaactgctctatatgtagtatttattccagcacatgcgaccgccgaccgagatgccagggtcgacgcgaagagaaaaatacacatctgaaattggccatgtgctcaatcaacacttttgtgtcgctaatgaaagtttctaacgcgtaggtacctaccaatctgtttaacaagagcttacctataacttgagtctcctggggaagttgctgtacgcgccggcagcgatgcgcagcgtgtgcttgaagtcctccttgtcgatgctgcctcggcctgaccggtcggtgtactggaagcagcggtccaagtcgttgcggaacgagtgcgaatgcttcccgctatgctggaacggagtgagctcggcaatgtcctcgagtgtcaacagaccgtccttgtcttggtccaccatgtcgaacacttggttggcgcactgggcgaacacgtcgggctgctgcgtttgaagctgcggccagtccaacaaggcggcgcaaaactcgtcgagagacaacaagccgtcgccatccaggtccaggttgcgcaagaagccgatggcttcgcctcgagtcagacggtagcctccgctagtcacatacgctgcgaattcctcgagtccgacgctttcgctgccatcacgagacacctcgctgaacagcaccaccacgtcctgctttgttgccagtggcagcagccgagtcacctcgttcagtacagcgtgctgcagactgttgagtgatctgtaaagctgcagcctctggactagtgtcccgttcagcactggccctgcaatgcccttggtggcttccttggcagcagcagaagccgtcgtcagcgctccaggggagagaggggcgctgggtcgaagccacggatgtttgagagcctgctcggctgtaaggcgtttagagacgtcgcgctcgagaagttgccgaaccaggtccttggcttcgtcggagataccggtccacggcggactttcgaggtcgatttcttcgtgtaaaatacgctcgtcaagcaacgctccggactcgaaggggaagcgtccacttagcagacgatacaaaatcactccacaactccagaggtctgacgggtaggcgtatttgtgcttgagaacctccggcgccgtgtacagcggcgtgccgtgcacctcgtgcaggaattctccatcctccaagaaggcagctccaccgaaatcagtcagcttgagcggactgtcctctttcgtgtcggcaaacataaagttctcgagcttcaggtctctgtgcaaaatacgcagcaagtggcactgccagaccacgtgcaggatgtccctcatgtacattttcgcccgctcttcctgctttgggtttgcagtcagatccagctccttctctctggacaaccttgccgatgcgtctccgcccacacaacgctccatcaccaggtacacattctcgtcatcctcgtacgctccgaagaaatgcacaacgttcagcgtgccacccagcagcaccatcgtgcgcccttcctgtttcagcgccgcatagtccttgcggctcaccactcgagacttggacacgatcttcaccgccaaatccaactgcagttcactaccacgcgaggtctcctgctgcatcggtaacgcgcaatatacttctccaaaggccccctcaccgagtttatctccaagcttgtacttctcgaggaagttccttggcagattgaactcgagctcttccggcttcgtaaagaagctcgcggcctcaagcgccacgtgctgaagcttcgggtacgacgctagcttgtccatgtatcctctccagctcttacggatgcagccgtagtggatccccagcggctttcgggacgaggagacttggctgctgtggttcacgaacgccgaggcaccaggcgtcaccgctgcgtctgcctgttgctgaggcgggtgctggtccggtgcgaccaagaagcagcggcgttggttgctggaggagtcgggacgcgcgcggacgaggggcgttgagcgacgcaaggcggagggtatcgccttcatgcttgattcggggatatcacgacttctagaggtcggacgacggcgagaaaagcatgtacgaatgcgcgtgagtgaggcgaacgaggtggtgcgcagcagatctacagcgagggcctgcgcgaagcaggagcagacgtagcgcgagccgcagtcgcgctattcgtagcgatcgtcccgctgactaggtggcggccgtttcataccaccgagaagctcccaagcgaagccatgtctcacggccacacaaacggtacgcaagctgaggtaccgaaaagatggtacgctccagtttaacggcgacgtcacgcaagcactgtcgtcagcggtgctcttgacacgtttgcatgatgatgcgagttgattgaactccaacttggaggcgacacacacacatcaagcggacggtgcgagctggcgtgtggaagtcctcaaggtagttgatggatggggtaaaaggctcactacacgcttaaattgaatggctgtcgataacatcggcagctgcggcctcacccgcaggcggtggcacctccgccctcctatctgccggcgagggtgacttgtccttctggagacgcagcacgctgccggacagaagccgactcgccggcgacagcaagaacaggatcgagtgcgacagcacagcggagtcgtcgtggatctcgacgtttgcttcgtccccaggttgccgcggcggcagcaaaacgcagtttacctgcacgttgcgcggctgaagctttgtagcgagggactttaccaacggctcaatggcggcgtcatctttagcagacgcaatattcacaatggtcccgctgctgggggccagccagccgtcctcaccaccgtccggaaagcagctcgtggacatggactcggtgagagcttcaacaagggctctacaacgcacaccaatagcatacacatcagcatcattggtgcgaatgataaaacctggaaaaagatacacgggacgtacgcgctcgaggcgatgggctcgcttttcgtagcatcttcagcagcgtcttcgggctgctcctgagtctcagcaagcgtcttcaccacctcggtaccggcgaagttaatcaggaaatcgacgcgctggtatttggaagcgatagagctgcaccactcagcaacatccttttgtgtccggaacgaccccagcacgggcaacatcacaccacgagttgtgtcttcgccctcggaggggaagcgagcgatatgcttggtattgaaatcgtccagcgccgtcatattcctgcacgattcagcgccaaagtgagcaaagacacctcttgcatatcaacaccagcatgaagcagcacttacgtaaaggtgagcagtacgctcgcccccaaaacccacaattgcgtcgctagagacgccacagacttgttgtcgcctccggtgaccaccacctatcacgattacagcacatcacagcaagcgtgtcagcatatcgttttgagcaggacggtagcttctgtctaaaacgtaccagcttgttgtaaaagactgtctgccattgtgcagacatcgcggcgtcttgatacagcatgtgtgaagccaagccgtccacaccaacagccgctccatcgtgaggaaccgctccattcgcacgcaacatgatcatcccaccggccgaatacgccgacgccgccattgcagctgcatccttttcacccgcgggaggggtagtcgcaagctttgcgcgcttgcggctgccctccaggtcctcccgcacgttcatatagtcgcccagagcgcgtttctggagctcggtatggtccgctgcagtcggacggacaggagcgcccacattctgcagctggttatacagtccgttgttgatctccgtgcgcgcattgcagcggccctcgcgcaggttctgcaggaagatctgcaccgccaggtctccttcggcctcgcgtttgtacttgagcagccgcatgaactccgggtgtttgctcatcaggtggttctcgatgcggccgcggcggcagttgaggcggctccagaccttggtcagctcgcgcttggacgacgggtcgtcgcacagcatgcagacgatcacctccttctgcttgtcggcgcccgcggcagctgcagcggcgacggcagcggccgccgtggcccctccagccgtgcgaacggccttgatcactcggccgtccatctccgtctcgggcagcgaccgctcgacgatcggcagcgagtgcagccagcgcttctggaaggtgaagacgcgcttgcgggacccggcgccggccgcggccttgggcgtctgctgttggatggaggccgcggctgcagccaccgctgcgtcagcagcttcggcgaccacttgcgcagacgaatcgtgcatggcgggggcggagaaggaagatgccgaggtgggggagcccgtggcgccgaccaccttgtccgtcatgacttaggggtgctttgacttcgtgccggaattgtttatatggcgctttgtatgtgctcgaatggtacagtttgaatggagggctggtactcggttacttacttaggttacttacttagggcacggcgtggattgtactccagaggtgacttgcggttggccatcatcaacgaaacaagattttgtatagtgaacatgatctaaatcagtatatgaagcagtcattgcggtacaatgctgcttatttaaaggtattagataccatcattccactacatgaactacattacagaggtaaacaactgtggagagtgttttgtcctagaggaagttgatcttgcccttcgaagttcaccattccccctccggccaaaagctccaaaggctcccgccgtcctccacctgcgtcgctctccctccctctctctctctcagcggcccagcgacgtctccgtgcctcatgaacgcgccgtcagctctgagctcgctgtacttctcggcgccaccggcgaccggcaacttccaggagcccaagcagctgctgccgctgccgctgccggtgccagtgtcgaagcccaaggcgaactcgaccgtcacgattctcccagcgcccaccgccgtctcagttaagacagatggcgtctcctcttgcccctcaacttctgtgatcgcccccatgagcccttcaactccccaagttgacgcatactcggcactcaagtcgaagttgctggatcatgagaatcagaatcagatacagcaacctgaggagatgccgtcgccactgccatcgcctgtgagcgtcacgggcaagagaaagcggctggacatggacgacgagctcacgtccttcttggcacccacgcccaccaagcgcaagggcagcagcgacttcctgcggaaaggtcaatggaccaacacggaggagcgactcgccaggctcctgatagaggcctttgaggacgggtatctccccatctacacaggtatccgactgcgtggctacttggccgtgcagttgcagtgcgaccccatgagggtgtccaaaaagttgtgtgctgggaccattgacggcaagcctgtgcccaagaactacgggcagaagaagtttaagctgcgcaagaagccgctctgggactgtgaagaggcggagagccgcattgccgagctcgagcgactgaccaaagccttgtggaacgaggcgcgcatgaagaagccgtcgttccttacgctctcgactacgcgtaatgtgagcaagaggggcgatgatgagtctgcatcttcgccgtctagtccagcggacggccgcgtgccgtcgtcaacccccaagtcgaagaagcaaaaggtgttccctatcatttatttaaacctgtccaagaagctcaagcactactcggttcgcggactggacagcagcagtagcagcggaagcgagcctgcttccccgtccaatgactccgactcggacagtgaacccgtaaggcttgacggtgagtcactgcaagctgcgtatgatctgctgactttatgtagtccacgaggcagcaaggtcaagtccaagaagcgtgcttcgaagaagagtaagggcatctctgccaaggagcatacatccagctcggatgcttcgagcgaggacgctgcttgtaaggaggcatccccggaggacaaatccagtgcggacaaacccaatgaggacaaatcgaaggaactcaaggctgcagaagatgaacccagccaggatatctctaccaatgaggctcctggcaataacgtctccgttgaggacgctcctgacacggaagtctccaaagcggatccccccattgcagatgatggcaacaaggacctgtcctgcaatgagaactccaatgaagtccaatctgacaaggctgcggaccctgtcggtgaacctcagctcgtcagcgacgacacctgcatggacgactcgctctccgcctcgacgtcgtcgacgtgatgtgcctcaccgcagtccgagcaaactcaccgccgtgcctccaacgcgttgtcggagcattcttgggctccacactttagtatctgaaccccatgtcgttttcctgtaatgaactgcgtgccaacttgactacactgtacactgcacctgcaacaaatcccacttcaacatgaagtggctccgccaatcacagctcttctttcgtctaattcgccagaattctcactgtagtatcaacaacttttttttgacaaaaagtggggtgatggctaatgaatggcttgagcaagtcatgcacactcctcgattcacggtccatgtgtcatggtgtttcactaaggtacaccgttccaacgttcgagcaaaacctggtatcgttgaagttgaagagatttcgatacgatgaactgcatcccttcaaattcgttcgctatcgagcccgaaagaaatgaatcaatcaatgcaccagcacccaggtttgacaggcggggctcttccatctactgttagaggatccatgttgacaagccctgttggtttcaatcgacaagcatgatcagaaccctatttttattctccccattgcgaactgaaaataccgtcctcttcgacgcttacgaacgacatcttatcgtgtttacatgtcattcaagttctcaccactctctcccctcaactctgctgatcgaaggtgatgcgcagatccgggacgctcgttgacctttacaagtctacgcaagtcaagttgcatggcatttactcctcgaagcgagtgcaagagctggcgaaattcgtgcgcgccacaagttgggtccgctctctcgcactcgcagtggcaacaccagtgctgagcttgcttccgacgcttctgatcgacattgtcccgctctcgaacccgtcggccggtgtcgattcaaacaagttgttctacgtacgggtgccattcaccaatttcgcttaggtgtgctcatacttgcatacccaattgcgtgcgccatccgcgatactctattggtatccacgctcgcttgtgccatggactacggcttcgctctagttattggcttcccgacgccgtttatgatgcagcttgcgattccaccatggtgtgcgatgatcttggtatgcttgtcaattcaatggcgaaactcgatacatcaagcagcggaagcaaccagaatgttggtggatatactcaagatctggtgctgcgatgtgctgctggtcgcggtgtacaccccctactttgctgctttcacaaatctgtccgctcaccgccagatgtggctcgccctgcttcttccagctttgaagctgttcatgcggaacctcttcgcgagagctgttggtcacttaggcgacgaagcgccagaaatcgtggtgttcaatgctgatgtctttggctcgttattcgtatcgtgctgcatgcagctatcgccttcgttttggatgacgctaggagttatgcttgcggatgtttttctcatggggttatccctccgtgatttaaggattgtaaacgtggaactgggggatttacaacggagacttgaccaagagtacacgtggactagtcatcacggcgcagttggtcacatcagcttgcgagatcgtgcacctacaacgctggagcgcgctagtatgctgctagatcaagaagccaactcaattggtctcactccagttgccccctgtggggagcctctcctttcatcgttgggctcgcaacaaaacggagaaagaccgacccataaggtcaaaacgaaaaaccaatgcgtgcgactgcccctcaggataaagcgactcctaaataggcagcatatcgtccccataggcgaaaaagacagcaatattgtcgatgagaagccaagtgagccagtcacacagagctacacgatcaaagttcggcggatgctttacatggctgaatatctcctccttatcaactacgtcgaggtcatcatcccgctcgtatattgtacgtaagacttgcgtcggatgcattaggcatattgttttacagtcgctcacagtttttctattctctaattgtgtcgagcagcttgttacttgatcgctacgtaccacatgccgaaccacgaatactacaccgtctttcaagggatggatcacgctcgactgtatcaaacactcaagaatgtgcagctgtactgcttgtttcagctcgtctcgcttcttttactcatgtataaactgaagttcacgttggggttcccaccggttcagcacttgggatttgtcctggaaaaccagatccagtgggtgctacttcacctcacgttctggatcatatacaacgtacaaggatcgctggagcacctaggttggttgtaaggaatgtgtattgtccgatgagttagtgtcggtctaattattattttcggcagggaatgactatacctttaagtgtgcgtggctgtcgactggtaccccttgaacacttaacagtaagacagacagtaaattacgccacaacaacagcgatcagtgacttttctttccatcttgaagtagcggattgactgatacggagaccaatgtactggtggcacctgtttcccccagaattgaattttctcgactgctacgacgatcacaatgtggctccgcgacgcttgcatacgagctgctcagcggcagttttcttccactgatgtggagtatcttgaagctgtctgcgagagatttatcgtctacttgcagcggccaaaatctgtgcgaggacgaaaaagtctgcattgacaacattatcccgtccgtggcaactgtgcagagctctagcttcgtagaaagtcgactgctgtttcagctggcgaacgaggcacggcaacgcgaggagcttggaatgcggatcttctacaggtgcgccgtgatcagccaactaaggtcttgcggagataccctgaagcaacagagcgtcttcagttgtggctgttcggctcaagtacaaactcacaccgcttaaatctcgggcaatttatcgctacgctatcgaaaattggtcatccgttgacgaccaatggattaaactgtttacagaagatggagctgatggatcagtgaaaaaaaaattgttggttatcattgacgttctagagaagaagtcgactgtgaacaagtcggctgagcctcgggacgccggcaagttagtgagttttgctcttgattcggcaagtgacgttattgcaccaggtcctcgtgcagtggattttgcgaagtatttcgctttgccctcgttcaggcaaacaagcgcatacgcaaatatcatcggtcgggcggaatgttggcagtactggtcgatagagacgccgaagttgctggctttaaggctccaatctgctcgacagtgaaggaaactctcccttcgttggtgatgacgtacacgatggatgcgttctggcgccgctactgtgataatttcagtatggacaagattttggcgcactaattcggtgcgacgcagaataatgacgtagaagcgctgacatcgttggtgtcgatggggcgtcctctgtggggttgtagcacgtttgacggcatcctggagacttatcgcttcgccaaccaattcgatactgtgaatagtgcaatcgtcctggcatcgtgcaagttgatggccggactgtatccgaggatctcgaactacaccgagtacaccgggtttggtgtcgcgtcggtactgtgtggactggggcttcgttggcgtttcaatgcgtctcgatcggtctcatacttgatggggacgctagcgtacttactcccggagtgtgacaagcttcttgctgtcaactcctcgaacctggtgctggctttaattgcaatgagactttggtacacgtgggggcgattatgtgtctttgttgtccgagtatatcgtatccggctactggtgttagaggggcgtgctgtacacaatgtaaacaaactggtggcttgcatcgtgttgctgctggtgataggcaaatgctcgtgctgcagaatccgtgggaaaatcacgggacatgtaactttcgaggtgattttgtgagtgcggggttgctcctgaaagctcttggtggggccaatccgcctctggtgcgttcaagagacagatgtgccgataggaactctttggtggagcgatacaagcagtggcaagtacggcgggctgactggaagctgggattttgccacttcattcggctgcaactggagcctacagaagaaacgctgtggtatctgtttgatcgtcgcgctgctggggtatttccgcgcgaccgagataatgaagatcttgtgatcccgatgtgccaaagacctgaggcatcaatgatcctaattcaagtggaccgggatggcgactttgatgaaaatattgcgttgatgcagcgtccctgcgtattttcaagtgagaattctctgtcgacaattccgcttcaagatatcgcgagtttcaatggtctttgaaggagagcgatcgtcgtgtagtgatcccgatcagtactttgttgctgacgaataggatggattcacgctgtgcattcgctccgtgtcgcgtccgcgggatgtcacggtgagcaaagtcacacttccagtgatttcgcaaggtgtggcgcagaaattggcgggcatggtgtcgtccagatggagctgccaggactgatggccactgacttgaacaaccggtgtgaaaaggagatcgagtgggctgatgtcagattaagcccgctcatatcggagactcgtcaccgaatagggaattcttgacgtgctgttgtgggcgtcgctcacgccgctggtgttcctgacttcccagtgtgcactttgaatctgatatctggtcttttccacgacgatgagggagattactgtgtcaaaagcagatttttgagttagataggtagcagtggcgcctggtcgacccgaacgactactaaaaggttggtaagaattacagtgacacctccctaaatgaacccctctaactgaccatgtgttccctatctggttaggattcctcgactgtggatttcactataggtgttctataactgatcaaaaacctctttattctctaaatggtcgcaattgttggcgcctcaaccctctaaatggacgccgtagtaatagatccaaactcatatatttttctcaatcacttgccagcctcctcccacgtatgccattgctaccactactcccgccacaagaaatcgagcgaagagagaaattttatttgggatgctaagttggaacaaagagtttgcagtaactgcaagcttgtgataaataagctagccacagtattttacaatcagcgcagcctacatatatatatattacgaaaaactaaaatattatgatgtcgagacaactaggggctatgcagtacataccaagcaaaagataaatctgcaggcatggtggcaggatatcgggacaacaaatattcctataacctccctgtattgaaactcacgtacaacctgaggggatgcgattctgctaataccaatgagaataaggagtaggaacagacaataccgcgcctaccgttattggttgagttctgtttgtgtgaagacgaaacaaaacaagagtacaaaaatgctggaggggtaccaggtaaagaaagcccttgtgcacctaacatatgaaaatgtagccattaaaagtgtagccatttctttatctgatcaattctttaactgaaacagcgtattagaccgagcgaactgggtgtcatttatagaggtgtcactgtatggtgctttgtttgttgatatgaatgactcagcgattgcttgctagtatgctgggaccaagtaaacgcatgtcaagggttgtccatcgaactctcttcagtagtagctagcagccccagcgttcgttcattttggaatttaccaaccaccaagtcaccaccaactatcaagcactcaacgaccactatcatggtgcctgcaactacgacgacaccaagtctgttggcatgacctaccgtttcctgggaaattcaggactccttgtatccaaactcggtctggggagctggatgaacgccaaggaggcgaacgcagcggaagcctagtacgagatgatgaagctggcgttcaagctcggcatcaactccttcgacaacgcggacgcctatggggagggtctcgccgagaaaaacatgggcattgctgtgcagaagggtgtcgatgaaggcgtctggagccgggaggacctcgcgatcgccaccaaagtcggtctggggacgaagggcttccgggacgcatcgggaccgaacgaccaaggcttaacgcgcaagcacatcattgaagcgaccaaggcctcgctcaagaggttcgatctcgagtacgtcgacgtcatttactgcattcggcccgatgtgtgcacgcccatggaagagactgtgcatgccaagaacttcgtcctagagcagggctgggctttctactggggcacgagtcagtggagcgtggctcagatcgtcgaggcttgcgatgttgcagaccgcctcggcctcgttcgccccgtcgtggagcagtgcgtctacaacctgctagaccgcaccaaggtggagttcgagtacgccgacctgtacaagaagtacaagctcggtctctcgacttggtcccctctctctggcggactactcacgggcaagcacagccaggagatcgtcaaaggttctcgtatggacggccccttgcgcacattcttcgcgcctgatttcgtcgagcgccaagccaaggcggacaaactccagtcggtggccgcagagcttggcatctccctgactgagctcgctttggcgtggtgcatcagcaacgagaacgtctccgcggtcatgatcggggccaagaacttggcgcagttggagctcaacctgaaggcgctgcctgcgttcgagaagaccacgccggaggtcaaggcccagatcgacgcgctcgtgccgttcgtgccgcagctcccaaagtccgatggattggagaaccgacgcaccaagttcctctaaggcactgattgtgaatgcggcgggcacagctacagcaatggacggcaccgataaatccttcaacatgaagcagcatacttagtacaggtattgatctagcaactaagttgcaattgatgagtcaaaacctggtctgtatcgagggcttcgagtgcgtaatatactgaaattgagctgatcccacgacgagccatcgctatcttcatcacaactgcggctctagcatcagtacatctgctgcagatgccgtcaagtcctcgtccggcgctgtcaccgatatgcgcggttttgaactgacattggcccgctcgatctccttttcacaccggttgttcaagtcactggccaccactcctgctgggctccatctcgatgacacgaagcccaccaatttctgcgccacaccttgcgaaatcactggaagtgtgactttgcccaccgtgatatcccacggacgccatacagagcgaatgcacagcgtgaatccatcctattcgtcagcaacaaagtaccgatcggatcactacacgacgatcgctctccttcaaagaccattgaaactcgcgatatcttgaagcggaattgttgacagagaattctcacttgcaggatgcctgtatgattgccctattcacagcatcgaattggcctggtaagcccccaggatgccgtcgaatatgctactccacagagggcgacccatcgaaaccaacgatgtcagcgcttctacgtcattattctgcgtcacaacgaacttgtgagctgaaatctcgtccatactgaaactatcacagtagcggcgccagaacgcttccgtcagcacaaacggagggagagtttccttcaccgccgagccgattggactattatagccagcaactccggcgtttccttcaacacggcatcgtaggggcaatcgaggagttcattttgaatatgagccgaggcttgaactgcacggcgaagcggggctgtgaaagactagcccctgtgatgtggtgggcgggttgcgagcgagcatcttgctggtgtcgatcgctggatcatcgacgctgctcggactgtacgctgctgctagacttcctgaatgaactctcgctaactaatttgctctgacgtcctcgcgcctgaaactactgttatcttcgtccaggtattcttgtctggatgtaccgctgatccttggtacttggtacttgaagtacttgcttgtactctgcctctgcaggaaacccgagtatgcttcaatctgcgcctctcttcactgcacttcgttacgttccgcttgcttcgcccgaatgctcgccatctctatcgggtagtactgagaaaatttcacccgaccgatgatatttgcgaatgcgcttgtttgcctgaacgagggcgatgcgaaatacttccgtaaaatgcactttgcgagggtctggtgaaatgacttcactacttaagtagctgaatcgagagcaaaaaccactaacttgccggtgtcctgacttgctcacaatagcctccttatctagaacttcaatttatttttcactgacccatcagcagacatttaatccattcggcaccaacggatggccagttttcgatagcggggcgatagattgcctccatccccagacttcagcggtgtgagtttgtacttggatcgaacagccacagcagaaggtgctctgctcctcgagggtattccccccccaaacctcagttgactgatcaagtgcgcacatgtagaagaccattcaaagctcctcgcgttgccgtgcttcgtttgccacctgaaacaacagtctactttttcccgaaaccagagctctgcacaattgtcacggacgggataatgttgttgatgcagactttctcgtactcgcagggggttcggtacacattccagcaccccggcaagtacacgagaaattcctcgcaaagagttccaagatagcccagatcagtgagagaaaaccgccgctgagttgctcatatggaggaaattcaattctagtggaaccagtaccctgcgggatggaaagaaagtctagattactgtcaatattttacctgctgagtgcttaaggggtaccagtcgacaaccacgcaaatttgaaggtatagtcattccctgccacacacaataattagaccgacacttcagacaagtctacataacttctagtacaaccaacctaggtgctccagcgatgcttgtacgttgtatatgatccagaacgtgaggtgaagtagcacccactggatctggttttccagcacaaaccccaagtgttggagtcccaacgtgaacttcagcttatacatgagtaaaagaagcgaggcgagctgaaacaagcagtacagctgcacattcttgagtgtttgatacagtcgagcgtgatccatcccttgaaagacggtgtagtattcgtggttcggcatgtggtacgtagcgatcaagtaacaagctgctcgacacaattagagaatagaaaaactgtgagcgactgtaaaacaatatgcctaatgcatccgacgcaagtcttacgtacaatatacgagcgggatgatgacctcgacgtagttgataaggaggagatattcagccatgtaaagcatccgccgaactttgatcgtgtagctctgtgtgactggctcacttggcttctcatcgacaatattgctgtctttttcgcctatggggacgatatgctgcctatttaggagtcgctttatcctgaggggcagtcgcacgcattggtttttcgttttgaccttatgggtcggtctttctccgttttgttgcgagcccaacgatgaaaggagaggctccccacagggggcaactggagtgagaccaattgagttggcttcttgatctagcagcatactagcgcgctccagcgttgtaggtgcacgatctcgcaagctgatgtgaccaactgcgccgtgatgactagtccacgtgtactcttggtcaagtctccgttgtaaatcccccagttccacgtttacaatccttaaatcacggagggataaccccatgagaaaaacatccgcaagcataactcctagcgtcatccaaaacgaaggcgatagctgcatgcagcacgatacgaataacgagccaaagacatcagcattgaacaccacgatttctggcgcttcgtcgcctaagtgaccaacagctctcgcgaagaggttccgcatgaacagcttcaaagctggaagaagcagggcgagccacatctggcggtgagcggacagatttgtgaaagcagcaaagtagggggtgtacactgcgaccagcagcacatcgcagcaccagatcttgagtatatccaccaacattctggttgcttccgctgcttgatgtatcgagtttcgccattgaattgacaagcataccaagatcatcgcacaccatggtggaatcgcaagctgcatcataaacggcgtcgggaagccaataactagagcgaagccgtagtccatggcacaagcgagcgtggataccaatagagtatcgcggatggcgcacgcaattgggtatgcaagtatgagcacacctaagcgaaattggtgaatggcacccgtacgtagaacaacttgtttgaatcgacaccggccgacgggttcgagagcgggacaatgtcgatcagaagcgtcggaagcaagctcagcactggtgttgccactgcgagtgcgagagagcggacccaacttgtggcgcgcacgaatttcgccagctcttgcactcgcttcgaggagtaaatgccatgcaacttgacttgcgtagacttgtaaaggtcaacgagcgtcccggatctgcgcatcaccttcgatcagcagagttgaggggagagagtggtgagaacttgaatgacatgtaaacacgataagatgtcgttcgtaagcgtcgaagaggacggtattttcagttcgcaatggggagaataaaaatagggttctgatcatgcttgtcgattgaaaccaacagggcttgtcaacatggatcctctaacagtagatggaagagccccgcctgtcaaacctgggtgctggtgcattgattgattcatttctttcgggctcgatagcgaacgaatttgaagggatgcagttcatcgtatcgaaatctcttcaacttcaacgataccaggttttgctcgaaatgaaacggcggcaactggcgtaccatttggaacatcgtggcccatgggcctggccgatgagtcaaggagcgtgcatgacttgctcaggcaattagccatgggtccagcgtgtccttagacccccctccccctctttctacagtatcgctttccatgctggactcctggaactctgagcttgcccaatattgagggagatcttctgtagacgatcacggctcatccttgcgtgctcgttagcacacgcttgattttgagatcgaacactaagctaagagcgtcatatactgtgtaccatcatatcatatgagtatttcacaccgatgtcatatcatataaatgtcatatcttttataatatcttatcgctcatattggtcaaatcgaataggtagtgaaaaattactcctgaggcttgagagcagtgagtttcacatgcgaattcgtcgtcgtagcagcaactgacgcatggccgcagctgtcgaagcgcggtggacactgtgtttactaaagctctgccagcggagtaaaccatgcccgtccacctctcattgcgtccaagcagctgcaaccgcgaacctcgtttcagacatcacaaagcgtgccggactgagcaactggtggttcaggtgcgcttttttcggtgggtggccaagtttgtcttattcattggttgaagttgtctgaattacgcgctctgattggtctcgagcacgtgttgaacgtattgccaagcctggacgatttgtacgctacgtggacagcaatgcagcaatgctgaatcagcattgcttcggagcaatcgcagtcaaaccagttctgtcacagtgcgaggcattcacgctctctccacaactgcgctgatggtcaccgtcctcctgcgggcggtttgtgcatgtgggtgccgatctgcattgcagcttgttttatgaccaaaaagcgcgtgccgtacccaagaaagcatcaacttctcgagtgtattgttgatactcctcttttcatgctgctgctagcatgacaaagatgaatggacaagatcggccatcagagtgtccgagcggtccattggactaagacgcatgccgccgctgaacaccataccacagcggatcgacccccggcacagtccggctcgtgccaccgtccaacggcagtcgagcatcgttttcctactaaaactaagctcaaaatggagctaccgctgtggaggaccggaacctggaggacatagtgcgatctattatcgattgtggccgctgttttctcatgacggcaggtgactccgttatccggcagcgctgcccgcaggatgcgttgttgcatggcgcgctttgcttcccgagtgctcaatggatatccgtcagatgcttcgccgccggcgagattcacaacgatgcttcatgccaccgagattcaacactcaggacgcacttctagccgaccaacaccggctagaacttggtccatagcccactgtgagctcacatttccaacgatagcattgccatcggaggcgggccttgcagggaactcacttattaaaacttaggtaaaaacaaacagcaaacgccgccgaagtgcgcggctcgtttgctcgctaacgcgattgggcttgcgcgcgagtcctgcaggcgaatggagcggctgcgcggcgctcactcagctcgcaagaacgggtcgcgccggcctcacggtcataagtcacagcgatgtggtcagcgctctgacattttcgctcgactggccacacgcgccgcacggcgctatgtctgttgttccttcaaggttcgccacgggtggctttgtcttttaacgaactcttagcccagctcatagaagcgcaacagagttcgagtatccgatatctcggtccaagatcggcgccagtatccaatctgctccatcaagaccaagatgccatctctgaatgccatcgctggcctgctgcctcctctggagatctccatccaggagagcagcatgctggtggacctcaccgagacgctcacgcagcacaacatcgcgcagtgcagcacggtcattgtgaccagggacggccacgccgactcgagggcctggaaggagctgcgacgcagggacaacatccgcgtctacaaggagcgagcgcgctccagggccacgcccaccaccccgtccctgctgctgctcggcaccgtcaagggcaacctcgacgacgtcatgtacgccatggtgacccccaccgagcaggccatgaagatcaagtccaactgcacgcacgacggcgtgatcgaccgcaaggtgctgcacgagatcgtgcgccccagcgtggacgacccgttccgccacgtgagcgtcaactggtcgctgtacgccgactcggagccgcacgactacgtgtgcgtcgaggccacgggcgtcacgcacacgctgcgcggcgagcgcgtgggcttccacctgtcgcactcggtggcgttctcgcagctgccgagcttctccgagtcgcacggcgtggagcgcggtcaccggtcgatctgctcgctgtaccgcgagacgacggcgggcgaggtcgagtgctacgtgcgcggcttcttcgacttccgcgacggcgacaacgagctgctgaccaacatcgcgctgcacgcgatcgccaaccagtggctgtcgttctcccggcagatcgagttcgcgcacatgaagaagctcgtgtggcgtctgcgtcgcaacagcagcgacttggacgacttcgtcatggctgcggccgtggaagagcacaagcggaagatgtcggaggcggctctgaatcgagaagccacttgccgagtgtgtaacaagacgttcgggctcctggaccgtaaaaccacctgtaagagctgcgagcaggctgtgtgtcctcggtgccgagtcaagaagcgcgtgtgcgtgctcgctccggaccaacgtacggtgctggagaagagacgcagcttctgcgctccgtgcattgctgaagtcaccacgagcaacgcgcgggctattgcgcaggaggaacttcaggtccaggaggaagatcaaatgaaggaggcggaagagcaggtcgtctcgctctctagacaacgcacgacgtcgtggatggctaccagtgcctcctttcgatcgtgcatatagaaataggtaaaatgaaaaaccaagccgtgctaaagcacggagaagctctggattttatcatgtagttttgattctaggtttgattctaagttaatttatcttaaatgtgcctagcagttctacccgaggttctttggttaaagcgaagtatccttaaatttcagcagttggtgcttttgtctttattcgggtttgctaccaagttccgaaaccatgaaagcatgcactgccaactatctcaagcccttacgcgaacatgtactggtcactcgctatgccttagctatcttgcaatattatgcagccgaatcgtcaaggcttgaatgcggcggtaacggtacgtatgcacgtgcagaatggttgaaacgagaccaccatcgtttgaagacttcaacgacacccacgactttaaattgaagtcgtgggtgttcgtggggacttgaacgtggcgacaccgatgtaacatcgttgaacatacatgtactgcaaacacaactgcagttatgtttggagtcatggtcgagtcatggtcgagcgacatccgatcaatcgtgtcacgcgaatgtcgaccctaaaagactcaagcaacacgccgctggataatatattatccaagcgtttattaaagttaacgggtacgttccgatacgttaataattcgttcgtttataaccgatagcggagcatgcatttttatagtgatttgcacctgcagtcgtatcgccctaacaactctggataaaatccagagaataagcagttaaacgaggtgcttcgagggcccggacgagttaaaaagtgccgcaattgtttattttaactcaaaaactcactaggaccaagcggtatgtaccggttttttcagcgcttttagcccgaatttcaatcgtgtttcaaccgttgatacactgatcaaacaccgagcaatagtatagtactctccataacaattgtaatatttagtattaatgctttattactggtactactaatatttagaatgacaacgactattcgcagttcgaagaactgtcgattggggaaggtttttggatgacatcgaacgacattcacgctacattcgtcacttcaccccgatgacatcaaacaacattcacacaacatcataccgcactcgatcgaatcggtctgaatgacacttagaggttttgatgggtaacctccagttggggtcatatacggtacagatctgagattggatctgacgtgctaaaaggtgttctgggggttgcaccccgagaccccaaactaactccgagttgcggcaacggtgctcgtcgctgggcccgcctccgcaataccgcgcggccctgcttcgcgggcaccacgcgcgggtttgctatggctacgctcctcacagacgcacctggtggtacgtcttctccggaaaaagagctccattcctcaacttgcgcgcccgatgccacatctcgatgttcttctccaagttgtcggccctcagctcgattcatagcttcgtgtctccattggacctttcaatgacagaggcccgtatgctcctcgtcttaaccaacgacctcgtccgccactgcaccgaaacaagcagcacggttctagttaccaagtgtggtcacgccgacgccagagcctggaaggagctgcgacgcagggacaacatccgcgtctacaaggagcgagcgcgctccagggccacgcccaccaccccgtccctgctgctgctcggcaccgtcaagggcaacctcgacgacgtcatgtacgccatggtgacccccaccgagcaggccatgaagatcaagtccaactgcacgcacgacggcgtgatcgaccgcaaggtgctgcacgagatcgtgcgccccagcgtggacgacccgttccgccacgtgagcgtcaactggtcgctgtacgccgactcggagccgcacgactacgtgtgcgtcgaggccacgggcgtcacgcacacgctgcgcggcgagcgcgtgggcttccacctgtcgcactcggtggcgttctcgcagctgccgagcttctccgagtcgcacggcgtggagcgcggtcaccggtcgatctgctcgctgtaccgcgagacgacggcgggcgaggtcgagtgctacgtgcgcggcttcttcgacttccgcgacggcgacaacgagctgctgaccaacatcgcgctgcacgcgatcgccaaccagtggctgtcgttctcccggcagatcgagttcgcgcacatgaagaagctcgtgtggcgtctgcgtcgcaacagcagcgacttggacgacttcgtcatggctgcggccgtggaagagcacaagcggaagatgtcggaggcggctctgaatcgagaagccacttgccgagtgtgtaacaagacgttcgggctcctggaccgtaaaaccacctgtaagagctgcgagcaggctgtgtgtcctcggtgccgagtcaagaagcgcgtgtgcgtgctcgctccggaccaacgtacggtgctggagaagagacgcagcttctgcgctccgtgcattgctgaagtcaccacgagcaacgcgcgggctattgcgcaggaggaacttcaggtccaggaggaagatcaaatgaaggaggcggaagagcaggtcgtctcgctctctagacaacgcacgacgtcgtggatggctaccagtgcctcctttcgatcgtgcatatagaaataggtaaaatgaaaaaccaagccgtgctaaagcacggagaagctctggattttatcatgtagttttgattctaggtttgattctaagttaatttatcttaaatgtgcctagcagttctacccgaggttctttggttaaagcgaagtatccttaaatttcagcagttggtgcttttgtctttattcgggtttgctaccaagttccgaaaccatgaaagcatgcactgccaactatctcaagcccttacgcgaacatgtactggtcactcgctatgccttagctatcttgcaatattatgcagccgaatcgtcaaggcttgaatgcggcggtaacggtacgtatgcacgtgcagaatggttgaaacgagaccaccatcgtttgaagacttcaacgacacccacgactttaaattgaagtcgtgggtgttcgtggggacttgaacgtggcgacaccgatgtaacatcgttgaacatacatgtactgcaaacacaactgcagttatgtttggagtcatggtcgagtcatggtcgagcgacatccgatcaatcgtgtcacgcgaatgtcgaccctaaaagactcaagcaacacgccgctggataatatattatccaagcgtttattaaagttaacgggtacgttccgatacgttaataattcgttcgtttataaccgatagcggagcatgcatttttatagtgatttgcacctgcagtcgtatcgccctaacaactctggataaaatccagagaataagcagttaaacgaggtgcttcgagggcccggacgagttaaaaagtgccgcaattgtttattttaactcaaaaactcactaggaccaagcggtatgtaccggttttttcagcgcttttagcccgaatttcaatcgtgtttcaaccgttgatacactgatcaaacaccgagcaatagtatagtactctccataacaattgtaatatttagtattaatgctttattactggtactactaatatttagaatgacaacgactattcgcagttcgaagaactgtcgattggggaaggtttttggatgacatcgaacgacattcacgctacattcgtcacttcaccccgatgacatcaaacaacattcacacaacatcataccgcactcgatcgaatcggtctgaatgacacttagaggttttgatgggtaacctccagttggggtcatatacggtacagatctgagattggatctgacgtgctaaaaggtgttctgggggttgcaccccgagaccccaaactaactccgagttgcggcaacggtgctcgtcgctgggcccgcctccgcaataccgcgcggccctgcttcgcgggcaccacgcgcgggtttgctatggctacgctcctcacagacgcacctggtggtacgtcttctccggaaaaagactaaaagctagctgcactagcttaggcgtttatctacgaagaatgggatgatttaagcttgtcttgtgtgagactacattgcgacccgcagagatccaccaaattggtggtgtagaatgatctactacttgatcctgttcttgtcaagacaagttcaaagtacattgttaccgatattagttaagatcatcctaatgccacacacttggacgaatcgaagctgacagtttttttgttgttagatcttcaggcgacccggacaaaatatgtgtgcggctgcaccatgttttatcgaacagagtttgaatgctcctacgttgtcgctgaacgccgcggattcctgtgcgagaggaagtcccgggcggacatcgtcaaagcgaatgacaaacacccggtgtatcctactcctacatgcgatcgaaatctgctagacctcagttttgactcatcaaacttgaaacaaattgctggcttcatcgggttatccagcaagttcggttgaacagttatccaggcagcgctaaatattcgattgcacgtttttttcttgttttatcgccatctgtaagtttccgagcacaacactgcaatctaagcaatacaggattctgcctgggcatcagcgcacatttcagtagcaggaaggaaggaaattacgttgattagctcgttgttgattactgttctatgctatgtgcaaagaactaaagttaaaactaaatccatggagtcctcatccgacgagcgggaggaggtagaatcaccacggttggtttgtcaagcccaagcgttgaagtatcaattcgttggagtgacgatacatgtatatgaactggcaatgcctttgaaaagaagcgatcaaacttggtacacttggttgtacagtggtagattaggcagatgctgcggctgcgaagcaggcgcaggggatgccatagtacatcgtctccctgtaagggtatccgtacacgctagcttcgaactgcgaaaccccccgggtccaccacccgggtccccaattaggctagtatttagacggacggcgatccttaggcacttcaacttgagtcacttcaacacttccgctgatcgcgctgtttcactttgtgtcctttttgtccttgcttcaatggtctggactcgacttgcgcgtggatgcaaacgagtggcggacaacgcattggagggcgaaactgcatgctaacacgttggacgagaccgacatttcagagccccgtgacctgtacctagacagcaacgacccccccctcagaacgccacgaacgctacgcgtagtcagcagaaaattttaatgcacgttggtgcgaggttatccatcgcgtgcctccacatcgtggtcaaccgccacaggtttcgacgctccatgcctacaaacgccaccgaagctgcctttcgtcatcggcccctttcaccgctcgtccccagcttgcagtgccggcaagggttacacagatcagtttgttccagtccgtcatcgacagctccagctccattcctcaacttgcgcgcccgatgccacatctcgatgttcttctccaagttgtcggccctcagctcgattcatagcttcgtgtctccattggacctttcaatgacagaggcccgtatgctcctcgtcttaaccaacgacctcgtccgccactgcaccgaaacaagcagcacggttctagttaccaagtgtggtcacgccgacgccagagcctggaaggagctgcgacgcagggacaacatccgcgtctacaaggagcgagcgcgctccagggccacgcccaccaccccgtccctgctgctgctcggcaccgtcaagggcaacctcgacgacgtcatgtacgccatggtgacccccaccgagcaggccatgaagatcaagtccaactgcacgcacgacggcgtgatcgaccgcaaggtgctgcacgagatcgtgcgccccagcgtggacgacccgttccgccacgtgagcgtcaactggtcgctgtacgccgactcggagccgcacgactacgtgtgcgtcgaggccacgggcgtcacgcacacgctgcgcggcgagcgcgtgggcttccacctgtcgcactcggtggcgttctcgcagctgccgagcttctccgagtcgcacggcgtggagcgcggtcaccggtcgatctgctcgctgtaccgcgagacgacggcgggcgaggtcgagtgctacgtgcgcggcttcttcgacttccgcgacggcgacaacgagctgctgaccaacatcgcgctgcacgcgatcgccaaccagtggctgtcgttctcccggcagatcgagttcgcgcacatgaagaagctcgtgtggcgtctgcgtcgcgatcgaagcgactcggatggcttcaacaaccaaaaccatgcaatacgagacgaaacctgctgcgtctgcttcaagtcgttcgggttcctggggcggaagacgtcgtgtgccagttgcgtacgagcggtgtgtcctcggtgccgcgtcaagaaattactgtgtaccgagacgtccgatgggcgaatagtgaccgaaaagaaggtcgcgttctgcaaaacatgcctgcgtgagagcttatcgagcagcgcccgcgtgatagcgcaccaggagctgcagttgattgaagacaaagctcttgtccagtcccgaagcgagctgatgaagctggcacggaagcgaacgccctcctggatcgccaccacttcctcgtttcgggtgcttcgtatgtgaactacacacttggtagttgatcagttgaataaccacgcaaacttgaacgtgtagtcgttgcctgcaacaccacagaagagcagttagactagtacttcgtcaatgcgaatcaatgcacaaggcctagcaaccgtaccgtagtgctccagcgttccctggacattgtacattatccagaacatgaggtgaacttgcaccccctgcatttgtttttccaagacgaagcccaactggtggagtggtgctaagcccagcgtgaatttcagtttatacattagcaagagcagcgaggcgagctggagcaagccgttcagcagcacgttcttgagcgtttggtacagttgagcgcgacccatcccgtaaaagacggtgtagtattcctgattgggcatatggtacgttgcaaccaagtaaaatgctgctcaacatacagtcagttcaccgcgagtatcactgcaagctcatattatataccaggacaacacgtacaatacacaagcggaatgatgacctcgacgtagttaacaagcaggaggaactcagccatgtagagtagtcgccggaccttgatcgtgtagctgcgagcagtaaaggcgcttggttgtcgaagcaaaatcgtatcacctccataaaaaataggcccaactcggtttcgacaaaataattgtgttaacccgtgaagtcgggtgagctaagacgtccaacgtggtttcttgtctgagcaaaatcctcaccaactttttgcaatcccgctgatgaaatatgagaagccgcatgcgcagccaccagcgtgaggtccctcggagcaacatctttccgacttatcaatatatttgctcgttccagagttgttggcatacgatttcgtgaattcgtttggccaatcgcgccacgttggctaccccatagacactcccggtcgagtagacgttcaatattcacaagctccgtacgtgcaacgctcagatcgcggatagatagccccatcagcaaggtgtcggcaatcataatcgccagtgtcgtctgaaacgagggcgatagctgcatgcagcacgatacgaacagcgagccaaagacgtcggcgttgaacacgacgatttctggcgtctcgtcgccaaggtgatgaacagctcgcgcgaagacatttcgcatgagcagcttcaaagctggtagaagcagtataaaccacatctgagcctgacgagacaaagctttgaaagtcacaaagtacgggatgtagactgcggccaccagtacatcacagcaccagattttgagcatatccacgagcattttggtcgcccccggggtgtcccgaaacaaatttctccattgaataaataagcagagcgagatcagcatggtccacgggggcatcatatgctgaatcgagaacggagttggaaacccgatagctagagcaaaaccgtactcgatcccacaactccccgctgccacaagcactgcatcccggatcactcgcttggttcagtacgggagtattgggactccaaggcgaaattggtggaagcaaaggagtgcacacgtcaaagtaacggagtataaacgcacgtagaacaacttgtttgaatggacgccagccgatgggtcggggagcgggatgatatcgacaagcagcgtcgggatcaggctcagcactggtgttagcaccgctagtgagacagagcgcgccgggtttgtagtacgtgtgaacttcgccagctcctggactcgcttcggggagtagataccgtgcaacttcacctgcgtagacttgtacagcttgacaagcttgctacatcgtggcattatcaatccgcacttcggtgagtagtgagttataagttcttggataagtatggttcatttgtggacgcaaaaatagtttgaagtttgcttactgatcttcacagtgccgctcactacagatacgtattagtcgtgcttcgtccatcaacgttgtgtagatattccattgccaaaattaactttgaatttggacatgggtttcctacttactccatcagactctcgcaaaagcattttggttttgctaagcttaccttctgagatgtcacacgatggtacacaacggtgcggatgaacaacagagtgagacttgggtgttttgggtgttgccacgctcgttcagagacgacttagctggaactatttgccctgacatctgcttctaggctgcttcctgacaagtttcttcattttaatgaagaaatttaatgtatcgcaaaatgattgttacatgtcgatgtgatcctcggacgtgcagtcattttggtaacctaacgctcacaaaaggccccaagcctcgtgccaacactttattcacgaacttctcatcctttttgtgctggcgttatgcttcatcgtcgtataaccacgcaaacttaaacgtgtaatcattatcttcaacacacacaagttaattagagcgattcgtggtcatcacgaatcaatacatgaccaaaccaaccgtagtgcgccaacgaaccctgcacattgtacattatccagaagatgcgatgaacttgcacccactggatctgcttttccaggacaaagcccaggtggtggacaggtgacagtctcaatgtgatgctcattctatacataagcaaaaggagcgaggcgaactggagcgcgcaatacaacagcacattcttgagcgtttgtgcacgatccatcccgcgaaaaacagagtaatattcctggtttggcatgtgataagttgcaaccaagtaaaatgctacaccgttaaaaaacgtggcaccgtaagtaataaaaaaacaatatcttcgactgccagttcacgcgatacgtacagtacacaagcggaattatgacctcaacgtagttcatgagtaggatgaactcagtcatataaagcagccgccgcaccttggccgtgtagctttgagcagttagaacgctcggttgtcgaaggaaaattgggccaccttcgtaaaactggaggcgaacgcggttccgacataatagttgtttcatcttgtgaagtgctggcaagtcgcgtgaactaggacctttggcgtgattttccctttggtcatggccttcatcaatttgtcgtgatcccgttgatgaaacttgaggaatcgcatgtggcttcagagcaaactctttccgaccaagcagcatgctagcgcgctccaaagttgtagacaaatgagcctgcctattagcgtggtcaggacgactactcactatactctcctggtccaatactccgaagttccctgcacgcaacacttaaatcatgaatagacagcgccatcaacaaggtgtccgcgaccataataaaaaaaaccgggtcgttctcgaccacaaagatcgccgtcacctccataagagagcgtagcactgcgacgtagctgaaaacccaattcacttcacttgtgtttacttcaaggcaatcgattgctgctgctcctcggcgcagcttaaatacaatcaaaactattcgctcactcggacatcgaccaccagtccgagtcgcgggtgtagactcgaagatgaacctcgtctcgcgcgacgtccagggcgttctcactgaggacgtcctggatgcacgggccgcagactggcagcttcttctcgaggatggctgtgttctcccagggtctcacagtgcacacggtcctcttcacctggcacttcgagcacaccagttggccgcacactctgcaggctttcttgcccgagccgagcagtccaaagctcttggtacagataccgcagtggcttgaagctttggctgccgctgagctcttccgtctttgcgccagtgtcatggagtcgaagctgctcccgctggagctgcacgagctgcacgtgtcgatgctgatgcgtgccgacttcttacgcagacgccacaccagcttcttcatctcagcgcactcgatcagctgcgagaaggacagccactggttggccatcgagttcatcgagatggcggagagcacggtgtcgtcctcctggaagtcgaagaagccgtgcacgtagcactcgacgctgttgggcgcgcgttggcgatacaatgcacagacggacaagttgcctcgctccacgtcggcgttctgaaagggaggcaattgcggaaacccgacggagtgtgcgatgtggtagccgatggactcgccctcggtcgtgatcgcaacacccgatgcctcgacgcaaatgtagtcgcggtgttcaggcacggaatacagtcgccacgccacgttcacgtgctgatacgggtcctccaccgtcggacgcaccacctcgtgcagcaccttggcgtctacgatgccatcctgcacgaacttggacttgactttgatgtcctcgtcgcaagaagctgagaccgcgtacataacgtcgttcagcgtgcctttaatggtgccgaacagcagcaacgagggcaccgtcggttcaagggcatcggggtctttgctcttcttgctgcgttgagtgtacacccggatggagtctttgcggcgcagctcgcgccattcgcgaggcgtcttgccagtcttgcgaacccgctccgagacgtggaggtactcgtcgatgttgctcagcacgaagttctccgccaagttctggagctcgatctcctcagtgtcgttgagtttcaagggtggcaaggcgtcgacgagtgagtggacggacttcatgctctgctcttcgtccgacggaatcgcaaatgatcccagtcgcagcagcagcaggttcgtcgaccagaacaagtcggtgggatataagtccagcttgaggcgttcggcgcgaggccttctccttaggccaatcgtcgacgctagcgccggcaaagtccagaacgcgtgatggctccgaccaatggagcgccacgcgtgacaagcgagctgctcatcagtcgagagcagcaggtgctcgagccaagttgaagcgagaagatcgctgagctttttgacacggacggacggagtcacgtgcattcctgtttctctttggggctatggtactagtgctggactactcactcacacgacgacggccagcaaacaaattgtcctcgaggttgcgttgcctccgaggggttcagttcatacagcttgtagtgcgcaggtctcgtcaatgtgcggcgtgtcttcgtcgtcctgtggctgccgctcgtgcagctctcggatctcgtcctgggcgatggccagcgcgtcgctcttggccacttggcaaacgcacgcggcgcagaacgtgcgcttcttgtccagcactgtgcgacggtcgggcgccagcacacacacgagcttcttgacgctgcagctggagcacacgccgcgctggcagatcttgcacgtccgacgcagcgagaagcccaagctgcgtctgcagacagcgcacccactgccactaccagcttcactcttgtcgatttgctgctgcgcggtctcctctaccggctcgatgaccatgggcccgttgactgggaggcccgagttcttgcgcaagcgccacacgagcttcttcatctctgcgcagtcgacgtaccgtgagacgctgagccattgcgtggccaccgcgttgatcgacaggctgttcatgagctcgttgctgtcgctgcggaagtcgtagaagccgcgcgcgtagcactcgacgagctcgggcgccttttggcggaacaggcagcacaccgacatgttggcgcgctcgacgccgaacttgtcgaagctcgggatctgcgagaacgccaccgagtgcgagatgctgaagccgatttgctcgcccttgctgctcgtggcaaagcccgtggcgtccacgcacacgaagtcgcgcgcgttgttgtgcaggcgccacttgacgccgacgtgtcggaacggctgctcctcgctcggagccacgacggactgcaccactttgctctcgagcacgccgtcctgcagacacttggacgtgagcttcatctgctcgtcggtcgcggccgccgccacgaacatgacgtcctcgagcttgcccacgaccgcgccgagcagcagaagcgacgggatgcagggcagcgcggggccggatgcagtagagtgcgtcgccgaccgctccttgtacacgcggatgccgtccttgcggcgcagctccttccattggtgggcgtccgcgtggccgtccgccgtcacctgcagcgcgttgaagctctccatgttgtggaccaccagcgtgtcggtcagctctcggagcgacgtcacgtccgactcgcccagctgcagctgcggcacgtaggccgccaagtcctgcgatcgcattgcgatggagtgaatacctagatgttcttgcgctctcgtgtccaatcccggaatgaagccctctggtagcggagaccgtcattgcgcgcgtcccgccacgcacttcaagctcctcgagccatcgtaaaagttcgaaatcagaaagagtaatttttggaaaggcaaaagtacactatctatcagatttacacgttttgttgacactgtagtatactaagatcggacgatctgttgtgttttatgaacactcttatgcatactttcatgaaagtttttcgacctgaattatgtcccgatgacaggtcatgtcttagcgacctgaacggcatcgctcttcactctccacgcgtttagactagtctggtagtctgagctggtcgtggaatccgggcgccttaacccagtcgcccccccatgtagtgcatcaaaacttttgattcaaaagtcgcggccagatatcggatgatccgagccccttggcgtcgtttcaattttcgaacgcgaacttgaacaggaacgactcactttcggtgcggcgtcggagcagcgtgcgcaccgaaaagcgttaggcatgattctgagagcgccagcagcatgttgcgctggcctaatcgagtcgagttcattgctgcaggaccctcaggtcggaatctacatgtactagccgcattttgatgcgaggtccgtggccgcgctgatgttccagagcgggaaaatgcgtgcgaggtggagcaccactccttgtttttccaaatacgagaacgatctcaatcctgctttcgcaaaaagctatcgtagttttggtaaagatgcgggctttgagcagaagagaactgtaggttcggaccggcaagcagtccgtccttctccaacatgcacaggcctggtcgtacatctaacattgctctttccttgattgcgcagctctcgaggtcgctctgtaatggtgaatgccgtacttacacaacgtggtccgtcagaagtaggccgccatctgcttgtcagcgttcaggatctcctcacgcgccacgcacacagcgtcgatccgcacgacgtcgttgatgcattgtgcgcagaacacacgcttcttctcgatcacggtcacctggtcggcggcaagcgccgccaccgtcttcaccacggagcaccgcgaacagacctgctcgttgcaagccttgcagaccttgcggcttgtgccgagaaacccgaagctcttggagcaaaccttgcacaatcccggagtgggtggcgccattggtagcttcgatttgccctcctcgctcgttagcgacatgatagattcgcggttgttcttcttgtgcatcgtccagagcagcttcttcgtctccgcgaccaggcgcgggaaggacatccactgagctgcaatggttgcgagggtagcgttgttgatactatcattcttacccaggtcgaagaacccgcgcgcgtagattttaaccgtcgacggcgtgttctgcacgtacagcgagcacagcgacatgttgcagcgcgggacgtcgcaactggagaagcgcgggacttgatcgaacccgatcgagtgcgttaggtggtatccgatccgctcccccttggcggatgtggcgatgccggtcgagtcgaggaagacgtggtcccggaactccggctcaccaaacatacaccacttgacgctgatgtggtggaaggggtcgtccatagtaggcctcgccacattgtggagtagcttacagtccacgatgccgtcttcgataagtgccgacttgattcgcatcgcttcggtggaaggagcgactacggcgtacatgaggtcttccagcgtaccaaccacagtccccagtagcatgagtgaaggcatctccaacggctcgcgcttggtagccctcttcttaaagaccctcgtgttttctctcttgcgaacccccttccagcggttcttgttcactggtgcaccagtcttcccgagatctaggctggcgtattgctcgatgttgtgcaggaccaaggtctccgctagctcgcaaaggttggtgttgtcttgctccgtgcattccaatggcttgagcaagtgcgaaaacttttgcgtcggcatgcatgggcgtattttatcttcgagttggtgatctctctgctgtcggtccttttgggttgtgtggtatgatctaccttcgacgagtctcgtcttagctgcttcagccctacagttcgtgccaatgcagtgctgctgaagcaaacaccaaccaatacgtccagttgagttgtcttcacgttgcgctcgatagcacccaaagctgaggtttggctggttccgtggcgagtctttcgtggtggtggaaatcggactggcgagaaggcgagccaagcgtttcccatcgagacgatgcggcactacgctcgcattgaggccgtcgtcttggtctccgctgaatgcggcggtccagcggtctattgattcggcccggaccccgccgcccacagctcgagcggggcacggaagacgctatactccctggcatagtttccgctagcaacaccaacgtacggcgcgtcacctctttactgcccgtgaggcacactgtcgagatgtccactagcctcacaatggctcgaaggtcggaccaagctcatgaagtagcaaactggcgctgctgcggtactgcagtcgaggacattgatctcggtttcttgataccgtttctgtgagcccatacagcgaaggctatcatgaacgcggcagtacagaggttgggatggtcgtgctatcatggcacctttgaagcctacgcttacagcaaacgcatccccggacatggcttacacatcgcgacgcggcgtatgcaacataggaccaagctgaaggtaacttgacgacactgaacttcgcaccagcggaaccagttctacaagtgacttgggttttgtatgccttacgttgaagttgacagtcacttgaagtttgacaatcatttattgtattcactcgactcgatctcagataaacgagtaaaatggtagcgacgaaggcctaaagatgtcgcttggatacatttcctgctcctcggcaaagttcacgaactgctccatgtcgttcatgctctgctggaactgccgaatgggctctgccagcactgtctcgctcgcgaagggctcctcctcgtagaaatgcaaggccgacgcgtttacaggcacctccctactgaaccacgagtagagatacgccatcttgggcacagtctcgctctgcacggcgtagtcgagtgggttgacctccacacctttctgggtcggcagaggcttgttgtagagcgctggggcgtggaagggaggcgcgatgctgtgccacgacgccaggccgttcatgaagtggtgcttgatagcgttctggaagataaaatgcgtcaggactcgtaccaaatcatcggcgttagagaacgatgaaggaaaatcgtgaatgtgctcgagacaggagcttcgttcagcccacgtctgtagctcggaatcacctcgaatcgcctcgtcgtcggcatagtatgctcgcacgtacttccttacaaacgtcttgaccgcatcgtagtacttggttccgtagcgattgaggcgataatcgggtaagaattccatctcacgggcagccaagtccgttgggaggtcgagcgcaatggaggttgtctcgaattcgcgcatcacggctcgtaacgatccagtagcgccgtagcccgtgacttggtcgtacggagtgccggggcttagcagctctcgtctggcgaagtactccattccgaaatctgcgaagaagtgatagtccagcaacgcgtagatcgggtgttcagtcgctagacttcgcatcatttcaacttgaacggggaccgagaccaggtgcgtctcgacaaagtgccgcatctgctggaaattgacctccgtggcgtggaatgccatctttgcaagttgccactcacccggtgagtccgccttcgtatacgtcagctctgagttaacaagcgtgatcgcaagtgggaggagctgccgcgtcttgacgttgttgcagaaaaacccgatggtattggggatgtacttgctgtccttggcagcttcgtcggtgagctcgccgtagtccgacaggtcggcgacaaagagcttgtggttgctcagagtacttgccaacgtcggctctccgcatacgtcttgaaacagaggaaacgggatgtcccacagatactccgcgtactcaccgccgtgcaccaatttcaagttgttgccgagaatgctgagccgcatggcgccgaagttctcgtcactcgagtcgagtgccaacggcgctggcatcatcccagtgtgggctaaatccttgtacgcttgatggaaatcctccgcatccccaaacggaagccgttcctccaggaaagtctgaaccttggacgcgttgaagttggttgtcgctgtaagagccgtagcctgctttaccaggtgctcgaagtacagcatccactcggtggaaacctccggccccgggttcaacacgaacgtttggtctcctaccgagtacgttcggttgacgttgcggatgagcatggagctggcttggacgatggacgcgcggtggccatcttcaggatctgggatgcccaatgcacttgtgctgagcagcaaagcgctgaagatggcagcaaccttcaggagagcagtcttcatcttggacgggagaagtcttgtccagtcgacggcaaaatgcaaaatgagcctttgcattgagtgcctcaggagagaccaggagcgttgtcaccgtacgtgcaaggaccttcacggtgtggattcttggcttcaagccacgtacgtggaggtcgtttctgaagacccgcactctcagcgagtggttgctgcactccatgcaggcaactatcatgcaacgtatctccccaaccgcgtagttatgacagaagggcccctcgcaagcttgggttgccttgaagaccatcaatcccttcctgcagacattcaaaatccaacatgttgaatcgtggtacgaatcctctgtaaggacgtgcgtacgctgagcaggtctggacaatgcgtactggggccattacgtagtcctaccaaagtcccacagacagcagagacacggtgcatacagtactaatatccgtcatacgaaaaagaaatcccagcatggagtgttgagaccatactggtagtgagatgttagctacggatttccagcttcagaaaagatctgcactttcttccttacctcctcgcctaccggaatatcaaatgatacactctcgagctaactcgccgataaagacttatttaatccttgtgcgcgctggtgatgtagttgagcagatcaatccgcgtggcgagacccgcaatcttgccgtcagttgaagtcacgacagcgaaatagtccttgtcaaagatcgtggcgagctccgctagcgagctttcgtgggtcacgcggctgaagtttccgaaggtcacagccgccacggggtccgcgcggctcacgcgaccagaagacagcatggacagcaggttgccgatggtcaccacaccctgcaccgtgccgttttctttcacgacgggaagctggtcgtagccgtgacgctccatcgtttcaatggcggcagcgcacgagagatgtggcgccaccgtcgacgggtgcggcagctccagcacagacacaggctgcgccgaccaccaggtgcccgtttccttgcggtacttggagtagttctcgcgcgtgtgcaccgtgttctccacaaacttgttctcgtacatccacgcgtcgttcaggaacttgctcatgtagttgcgcgtcgagtccggcaggataacaacgcaacgctggccagccttcagagttgaagcagcgcgcacagcggccgccatggcagagccactcgatccaccgcacagcagtccctcctcgcggatcaggcgacgggacatgatgaacgactcctggtcgttcgtcttctcccacttgtcgaccaggttgcggtcaagcacatccgggatgaaatcgtagccgatcccttcaaccttgtacgactggaggcggttcttgtcgttcagggattcgggctgagccagaatcgatccctccgggtccacgcccacgacgatcacatcagggcacttctccttgagcttcttggcgataccggagatggtgccgccagtgccgacgcccataaccaccatgtcgaccttgccgtcacactggtccaggatctcttcggcagtgccttcgtagtgagccagcgggttcgatgggttggcgtactggtcgaggatgtgggcgttcgggagctcggcctgcagccgcttggcgatgccgatgtggctctcgggcgagtcccacgcagcctccgtcggcgtgcggatgatttccgcgcccagcgccttgaggacgttcaccttctccagactcatcttctctgcaacagcacaattgcaccaatatccatgtaaataacccccattcaaccactggcagcaccagcacagacaacggcagccttaccgggcagcgtgatgatgcagcggtagcccttgatcgccgacgcaagcgccaagccgatgcctagcacataaaggaacacacagcgtcagcccccccttttaagcagccaaacagcagcctaccacttcacgcaccagtgttgcccgacgtgggctcgatgagcgtgtcgcccggcttgatgcggcccgcggcctcggcgtcctccaccatgcgcttgccgatgcggtccttgacggagccgccggcgttgaagaactcgcacttggccaggagctcgcactgcagatgcgccttcttgccgatgctgttgacgcgcaccatgggcgtctggccgatcgccgcctggagaggagagcgcgaggacgatccaggtcagcggctagcggacaccatgccataatggctacatctcggcttctacgcggaattgggaggtaattccggtatgcacgcagaggggagatgcgaggctacgcaccatgatgtccggcaggatctccagcgccgcggggggcagggacgactcgagcgaagtggaggaagccatggctgcgcgtgtggagtcgaggttgaggtggtacgggggatgcgctgcaccgagaaggcggagtggtgtggcgaacacgaaacaccaccttcacttaaaacgatcttgtggcagtgtgagccactccaggaacgtgccagggctagggctttcatcttggcgtgtttgacctgtcaaatcggatggaattcgttggctgggcgctctttgcgccgtcggcgagaactccgatcctcgatgtacgtgtgccacacaggtcctccgtcaacgcaaaaacattcaaatctacctcaatacaatgcataaaccgcgcaactcgatcgggatccgagatgatggtgcagagcgcggccacccgcaatctgaggtctccattccgcgcgccgggacgagtgcgcattccgcatttggctccgtcccgaccaagcagcttcaaccccctccgccttcacacacactccgccaccatggttctcgtacgtgcgcgcgctctgccttctcgcctcctcagcggcagcctgtgacgctgccgctgtccgcgccgccttctcctcctgcgcagagcccagccactgacgccttttgccgtgttgcttcttctctacctctttacaggccggtaacgccacgatcgaggagcaggaccccgagatcttcaacctcattgaggccgagaagaaccgccagtggaagtgcctggagctcatcgcctcggagaacttcacgtcgcgcgccgtcatggactgcctgggctcgtgcctgaccaacaagtacgccgagggcctgccgaacgcgcgctactacggcggcaacgagatcatcgacaagatcgagatcctgtgccagcagcgcgcgctgcaggcctacgacctggacgccgagaagtggggcgtcaacgtgcagccgtactcgggctcgcccgccaacttcgccgtgtacacggctctgctgcgcccgcacgaccgcatcatgggcctggacctgcccagtggaggccacctgacccacggcttctacacgtactcgaaggccgagaacacgcgcaaggccgtgtccgctacgtccgtgtacttcgagtcgctgccctaccgtgtgagcgccgagaccggtctgattgactttgagaagctcgctgagcaggccgctctcttcaagcccgccctcattgtgtgcggtggcagcgcctacccgcgcgactgggactacgccgccttccgcaagatcgccgatgacaacggcgctctgctcatgtgcgacatggcccactacagcggcctggtcgccaccaaggagcacgccagccccttcgactactgcgacatcgtgaccaccacgacccacaagtcgctgcgtggcccccgtgccggtatgatcttcttccgccgcgacgagcgcaacttcgagccgcgcatcaaccaggccgtgttccccgctctccagggcggcccccacgagcaccagatcgccggtatcgctgctcagctgaaggaggtgcagaccccggagttcaaggcctacgtgcagcagctcaaggctaacgccaagatccttgccaagacccttacggacctgggctactccatgtgcacgggcggcaccgacaaccacctgatcctgtgggacctgcgcccgcagaaggtcacgggctccaagctcgagaagctgtgcgacctggtgtgcatcacgctcaacaagaacgccgtgctcggcgaccgcagcgccctgaccccgggtggtgtgcgtgtcggcacgcccgctctgacgagccgtggcttcaaggaggctgaattcgtcaaggtcgctgagttcctcgaccgcgccgtgaagctgtgcgttgagatccaggccacgagcggcaagaagctggtggacttcgtcaaggccgctgaggcccacgaaggcgtgaagcagctccgtcgcgacgtgaacgcgctggccacgtccttcgagatgcccggctttaaggtgtcggagatgcgcaacaagacgattgaggaataagcgcctcgtatagatcgcttttccactgcctatagattgtgtgcggtgtcaaattcgggagctgcaagcaaacaaagcaccttccgccactgacatagtaatgcatgtcgtgtgatctaatccaacccacaaaacaaaccccactcaatatattcagccgcagtcgatggcttcaaccaaacactacaatcctagctgtacgctgtccgtcgagcaacttgttcaaatgtcagccgctgacccagtaccgtcgaatgtttccattgtctccatcgttgttcggcgagtcgaagagtacgaggagcggtgacccaggagttcctcgcggaggatgagcgcggcgtcgcttttggctccctccgcaatgcactgcgcgcagaagacgagcttcttgtcgttcaccttgctcttgttgtgcgacgacaccacgcacacctgcttcttgacgcagcagcgcttgcagacccactcggcgcagcaggcacaagctcgcggcgtcgtgcgcatgaacccaccaaaaccacgattgcaaacgcggcaccgagtccccgcctgtaccttaggccgagagtgctgccggatgcccgcgatgccaccggatgacgtcgagctggagctctggctgctgctggcgaacgagtctcgacccgttcggatccgcatccaccacacgagcttcttcatctgcgcgcactcgacgtagcgagccatcgacagccactgcgtcgaaatggtgtgcagcgagatgttgttgagcatctcgttgttcgagtggaagtcgaagtacccgcgcgtgtagcactcgacgagtgtagatgtcttttgtcggaagaatgtgcacacggacatgttggctcgctcgacgccgtagttgcggtagacggggagttgcgcgaagtcgagcgagtgaacgaggtggaaaccaacaagctcgccagagtcgttgggcagcagccccgtggcctcgatgcacgtgtagtcgcgcggctcggacagcgagtagtagcgccacgtgacgttaagcgcgtggaacgggtcgtccgacgacgggctctcgacgcagcatagcaccttgctgttgaccacgccgtcctgcacaaatttggagcgcgctcgcatggaatccgtgctggtggcgatcgacgcgtacatgacgtcattcaggctgcctgctacggtaccaagcatcaacagcgacgggatgcccgactgctctgggtgagcgatccccgctctcatacacgtagcgctgttcccgctgggcattgagttctggggttgaaactccttgaacacgcgcactccttccttgcgctgcatctctctccatgtccgcgagtcggggaagccgtccctcgttagacgcagctccttctgctgggccaggttcgtctcgagcaagctcacagacaactccaagatcgccttcatgtccagactcgacaagtgcagccgcagcagcgactgcgccatcaggtcgtccttggacatggtggtgctcagctgtggctccggaatggttgctcgctcgctagaagacttaatttcgtgtgccggagcgtcggatcttgagacgccctacggagtatggagcacgccgtgaaaaccacaatgccacaagccaagttagcgactggttaaatgattcattcacctccatcgctcggcgttacggagccacagaactgccgaaccggcgacgacagacagattccgggaaggagtgtgtcaggtcggaggacgccatgacatgcaggcgccctggagacgtttgcacggcctattacacccacctctcgccacaaacttgacgccacagcgtgaccgctcggctcaaaacgaacaagtctcccgcctgtcgctcctgcgtgtgcgctcttgagtcgtaagctggcgaggaattcctctacctgcgaacgaaagcaattcagcgaatgcagtcgcctggacgacgcgcagtgaagacgctcgttgcaaactgcataaaagactcgaatgagtgcagcggcgcgactcataccgggcgagatacttttgctagacgctcgccacagtggcgtcggcttgacctgcccgctcgcctcttctccggccagtcttattcgcgctagccacgtgagacttgcctcagacgcatctggctacgcgtcctgcgcctcattcgtttgcaatgcgatgctgcgggcacgcgcgtgtacagctctgctctgctccgctccgctggacggaagcgcctacagacaacgaacgacttacaaagccggcagacacaaaaagccggcagacgaagtcaagcaaagcttaacatgagcaaaccagccaatcagattcaatcaaatgacttcatctttgtataccatctggtttagtgtactttatatgctttcttgtgtactttatgcaacacgccgtgtgttttatgacagttttacagatttgacgggagggaatgtatcgttgtttttatataggaggatatgccggctttgtaagtcgttgtctgtaatgcagttcaaaaagtgacaggcaaaaagtatcctgactcgaatcgagtcggaacgtggaccacatacgaatttcaagatgtacaaaccctttcaatctcgatagttgtagtgaactattgcaataaagaagttaggtagagcatgatacgtgtatttttcatatcgccctaatgctcgctttgatcgcgtgtggcaagatgcatcgttgttgcttgtgccagtcacgtcggcagcgcctggcaccaatgctcaatgctcgcaatcaccgtgcttttcttgagctacctgggagagaaacgacgagtcaggtgcaatggtatctgcgcacctggcgtttcatcagtagcggcgtgtaaaccaccagtcgagcgcgagccacctacaagacaggcaacgaagtcgctgccggtcgtgcgggtggttcgtctaggctgtcctccagtcttccaatatgcacgtgaggaggcggcacaacgtcgtccgcgcctaagcgcgccgatagcggagaccgaaggtgggttcgcataggcgaggtaggaacattacgacaatgcaagtgctcgggtacagatactcgttgatgcttacgttcaacttgcgcgctctccaccgaattctctctgcagattggtgaagagaacgagattagcctcgtacaccccatgcgtttgggtcgctaaaatcgctgagaaaacaaatacttcactttgtaagtatctacggcggaaatgcacactactcgcgcccatacccacatacaccgatcatagacggaagacctgtattccttcacgccggcgcttcaaggcgagcaccacacgacttggagctgatgatgatcaccagcaatgcggcggcactttcatactgcgcagatttcctcttgatctgcaggcccagcgacgatagtctcaagggtagtgctctttcttccgaggagtggtgcaattggcggctttttcgacgcttgacatcgaggttcaaagctaccaactgtgctgggcttgtgcggccgcgacaaagtcgtctcgtgccaccgcgccggcctcgctcctcatcgcatcggccacacactgcttgcagaagtttttcttgcgttcccgtacacactgccgagtgcgagaaaacagcaccaaagtctccttcacgctgcagcgggagcacacatcatcgtcgcaggcttgacaaatacgtcgagatgctccgagaaaccgaaagctcttacagcacagcttacaccgggacgccggaaccctagccggctcaggcggtgcgggtagtaacacaaccgagttacttgagctcgacgtagaacttgacatggttggattgtacgggttgctgctgtagtgtccaaagccgccgtctccactgtcgctctcactcccgtccgaagatatggctcccttaccgcagttcagcagccgagcgagcttcatactttgagcgtacgccacgagcttggcgcacgaaacccattgcgacgcgatcgcgtgcagtgagatggagttgagcatggcgttggtcgtgtcgaactcgtagaatcctctcgcgtagcactcgaccagcgacgcggttctctgacggaagatccagcagacggacatgttggcgcgagcaatgcctttgtggtcgaagtttggcagtgtatcgaagccgacggagtggatgaggtggtaagcaacctgctctccatgcgtagtgtgcccccaaccagcgacatccaagcacacgtagtctcggggctcggacagcgcgaagtatctccaagtcacattgaggaagtgcatcgggtctgccatcgtaggctccacaatacgcgctagcaccttgcagtcgacagctccgtcatcgatgaacttggatttggtcaacatcgcctcggtagtcgaggctgctgacgcgtacagcaagtcgtcgaggttgcccttgatcgtgcccatgagcagcagcgacggtggcaccttggccgtcttggctgagccgtttcctgttgctgcttgggacctgagctgctgttgctgttggcgcgagctttccttgtagacccgcacaccctctcgcttctggatcggcacccaggaacgcgagtccggatgaccgtctgaagtcaccgccagcccgctatactggtcgaggttctgctgcaaaagggtccctgccagctcctgcatcatcttttcatcgtggcgctccagctccaacgtcggcatcgtgatgccgttcttggggggagacatgctgtctgagctcggaattgttcccacgtgctagtgctgggttcgacaatgaaacccaacgtcaaagtggtttgaaatgcgttctctcgactgtcacgcggcgatttagcaagtgagcagttcctggctggtccgaagcccagatttgaaggccaaatacgccacaaaaacgtcgtcgcgggttgaagcgactgaagcctgtccgggcagcgaaactggaacgaaagcggcacgacggcgtcgccttttagttggtaatcgcccagcaccttcgtctggatcgccatccctcgtgccgcgcgccaaccatctgcatcgttggaagtcaagtgggtagtatgacgactaggtcgccgtgactcgccgtaatactcaggcaagtcgccaccaaaacgcttgcgctctcgctggaacgcgagcatgtgagtgccctgctttcagtttcgtcgggtcgacagccggctgaggggaaccgcctgcgcactcaggagacccactacttcctgcttgctcttagtatggagagcagcgtgagtcaagcgcagcactggcaaaacctacctttagaggcgagaagtcatgcccgatcctttggcggagcgcctaagccatcatgcttcactccagaagttgctggaccgacagtgaattcctagtgtagcgctaaggtcgagtttgaagcacggcactgctgtggcgggtgcccagcgttcatattattagtttgaggcgggcactaatgatcgacacgatcacgacgcgaagacgctgacttcggtatgctctgatacagtatctacaccatgaggcctgcagcgtagccacttcatgccataatcttaggtgctagaccacgcgttacttgtgttgcagtgcacctgctgtcaggaaagtcccccaacgtaggtaacctatgagaaggtcagcactcaagtgctgagtgctggggctcaaagtgaggttagctggatatgtgggctaagtgttgcgcgaatcccccttcagtattgctacgaacagtttacgcttagtaaatttggcgagctaaagataaaggcacgtgcgcttcaacgcatggacgaagtcctattcgtgtcaggtaagagcacgaatctgtgccaagctacagttgggatgcccttgcttcgagttatctttggccctctgctctgttcgtagctagaggttcaatcgtcaactggttctccggcgtgaagctcagcgcgggacaagaggctggattattacaaccccaaggacgaacacagctagcgatggccatcactcaagatgatatggactcgctggctcgaacgctcttcatccccgtaatgctcgtgctcgactcggccatgttccagtacctcgtgatggtgtactactcgaggagagaggaaacccgcgtccgacttcttctgttggcgtcgttcctcggattcgcgactcaagtttactcgcacgaaagcatggaaatggctttggagctcaacgatatctaggagacgagcctgcagctgacgttcctcgcccagatttctctcatcggccgcgctgtctgcaccaaggtcaaagtccggggaatttactggttcacgtgcatctcagaggtgctggttgcgttgtgttggcttgacgtggtgtgcacaaccttagaagtcgcggatgtcatccaaggagacctgtttcatttgtgcgggaacgtgctcgagtccttctcgctcctcttcgtgctcgcctttcgcttctactatctatcactgacgaacggctttcgctcggtgctgctggagcgcaagctcgacatctcactttacgtgatttttgtgcttcatgagttcccgttcatcgtccttgagcacaaaaccggcatctcgtgggaatttgcgcagggaattttcaaccggatcatgatcgtcgcctgcatcctgcaaaacctccggcagaaggcgctcccaagcagtggcaacagcagcagcgccaagggcaagacgtatgccattggctccatccctactcgaatcgcatcgttgaagtcccaaggctccattatcagaaatgctcttgtctcgaaaacgggctcgttccggtagtaccaagcgccactagaaatctccagaattgcggtatcttccagcatgaagatagaaagcttggggccatctgcaagcatgattgagcctgcaggtaacgtcgagacattcgagtgaataaaatactggctgatatccaccataatcgacaaagttcgggtcagacagagatcagtgaaagtagcttcgacttgacgacacgcgcgccaagccgtgtgccaaatagcgcgctcgaaatgccagctcaagtgcactgtgaggctctgggaaaacatagccaccctcgaatagaagttgccaatctacggtccgtgcatccaggacgtcctcagggacaacgtactaggcgtcgcgcgagacgaggtacatctacggtcgatgagcgaatagttttaactgtattgctgctgataagcagcagcaatcaattatctcgaagtggatgcaagtgaagcaaattcttttttttagctacgtcgcagtgctatgctctcttatggaggtgacagcgatctttgtggttgagaatgacccgggttttaccgaagtcgacttcagagctggtgtgtgggtcgttggtgctgccagttgcttctgcactggagcaggcgcatagcgcttgcttctcacggtggagttcttgttgctgcttttgctgctgcttctgcttgaaatcgccttatgacggatattctgcacgatgcacgccacgacgaacacacggttgccaattccctgggcgaactcccacgtgactccagtgtagtattcaagcatcatgaacgggaactcgtgaatgaccagtagcacgtacagaaacatctcgaattttcgctcttcaagcacagtcttgagcccgtgggtgagtgacaagtagtaaaagcgaaacactatgacgaagatgagcgacgtcgactcgagcacgttcccaatcaagctgaggacgtcgccctttatcacgtcggagacttccaggattgtccagcacaaccagcgcatccgcagtgtacgtgaagtagaagatggagcgaagcttgacctttttgcagacagcgcgaccgatgagagtgatctgagtgacgaacgttaattgcaaactcgtctcggagatgtcgttgagctccagggccatctcgcggttgtcgtgcgagtaaacctgcgtcacaaaccccaaaagagcagccaacagcagggagcgcacgcggaactcttttcttctggagtagtagactgccacaagattctggaacacccacacgtctaacaccagcatgacggggatgaacaccgaccgggatatagcgtccatgccatcttgcgtgattgccatgactcgctattgagttgcttagtacactggaaaacgatggtttttttgacacgaactgctaaagcgaggggtgaaagtgaaaatgagcagactaagttggttcgcaccagaacactcttatcgtcattgcacacctagaatagctgtgccgaacaagtccctagaatttaaaaaagatcagttattgcacgatgacattaggaattggacagttttcagcaggtaaacaacacaaacgataaattaaaaatgcaattgagatcgcgtttttaatttgtaccgacaaggacttaaaactcctcactccaacggacttctcgactaactcacgcaagaaaacattacacggtacagtaaggttgtcagattttacaagtagacgcaggtaaaaccgtacggcctactttccgaagcgaatccacgaggtggtgatattcatgcataacaaaaactccgtgcgcttgctgcactagcggtggatttacgctgtttgttgaaatttccctgcttgctgaacatttgtcgtgttggcctagaacgctcggttgtcgaaagaaaatcgagccaccttgataaaaatcgggaccaattgtagttgatgcgatgcttggcgtcagattttttttcacacctttagtattagttttgcacacatacatcatcagacaactacagtagtacgatttcgcgcgttcaggaattgaagccacttggtgagctcagggattcgttcaaagtcactttacttccgctatcttggtacgtgtaaatccgaacgtaataactaccatttagattattgcgcagcaagaaatagagtctaacatttgggaaactcggtggacggtctgttaccgcatattcgtggggcataccttcttcagtatgtttttttcttcataaatatcaatattatacatagtttatgttaggaggttctgcgtaggtatctaatcggtattatacgttaaatatgctacttttgcattatccagaatttgtggatttcctttcagcaaagaaacgacggaatacatggctagaaacttatcggctttgatttacttagtaaatactactacaatcgaaaatagaaagcaaaagaccagtatattatgtgcaattatatgaaaatgccactgttaagtgaaattgagcatgaaatatcaacgttaaagcgcgttcttggcctgtttgcgcttgtgcttgggcttgggtcctggtttaaatccgcgcttgccgatgcgtgctggttcagctaggagctcggggatgcgcaaggtcgagcctacattgagcgtcacatccgtggccatggacggaatgcgaacgtgtacgtctctcgaaaatgttcaatggacatgcgtttggcgtcgtagagatcattgacccgcttaccgtcttagatggccgcgcaaattgcgtggatgcacggaaaagcttcatcttgccatccgccacatgtacactccgattcaggcaaattcacgagtcgccatgtgtggatgtgactttggcgcgtgcgtgggccagatgctgcaccgaataagcgcccttcatcagaggaatcttcgcgcacatgttggctgccgtagtcctgtccttcagttgtttctgcaggattggatccaactctgtccccgctttggatgccgcccagttcgccgccatttgcctcttgtcagaagtgagctcgcttagcttcatgaagtacatgttgaacgcgtcgagtggcttggcgctgcgcagctcagtgcccaaccagttgttggcttgctcagacaagttggacgtaatctcgttgaaagtcgggaggccgaaggcttcacggaacttgtacttgacccagtgtttgtgatcgacgttgtccatgtactccgccgccttggggtttgacgctgccagttcggtgaagaagagcttgtagtcattttcacagtcgctacgagcaagttgacaggttaggcgcctgtcttcgtttgttagcttcgccccagtgcaatgcgcgttgtccatcaggtgccgaaggcaaaaacgatgtccagcctacggaaacaccgcggcgacagctgcgaggagccctttttggcggtcggataaagctgtgaagcggtcgatcttcgtagcaaacttgacacaatccatgaaccagtaccagtgctcgtagttctcagtcgggaccaaggcgaacgcgaaagggatcacgtgattgttgtagtcttttgtcgtggcgaccagaaaaacgctccgcttgttcatctccccctagagatgagcagcgtcgaaacccggccattgggaggatgtgaatcccaacatttgggataaacacggcacgctcaaatgtcacgtcgtccttagcgcgatcgagacgccaaactgatccggggttttggtcgaaaaccagctccaggtaggatcccaacttctggtaactttcaacgaggtcaccgtggagcctatcgtcaatatccagccgaattctggaaattgcgcttttagccaggtgaaatccccttgatatgaggaaattcttgatagccttgcccgtgagcgtgtcgatggatcggttgtgagctggtaacatctctttcatcacaaggagagtcaaccgctcaatttcttgggtcgtgttacgctaagccctagccgggcgcgcaatcgagccttcgacacacggtgcttgagtgaagccaacgtgtttggcgtggttgtgggcaaagttagcccgcgtaattttccatttcctgtccagcccgaagacattgatgaaaaacggacactgcagcttgtccaccggagtctcgctgtcgaaaacctggacaccgttcaggtttttacactggtacttggcgttccccgagttgtttggcttcacactgctttgcttcactataagatgaaacccgcatttgatggcgaactctttgcacgtggatcggagggccttctgtgtcgaaaacgcttccgttgcgatgttgtcttggcggtcgtacgcgaacccgaaatctggacgtgccaaatcttcacagtgaacatggacgtcttcacgtagcaatcctagctcccgtgcggcatggaggtcggagtcgtcgacctggaaacgcgccttgccaaacttgctggatggatatgctgccggcgccgccatttcgaaaattaggccgcaagaagagagatactcgactagcccgtggaaattttcatgtaactatccgttgggtggtttcacgtgtctactaaccgagaataattcacctatttgaaatataacagtatcttagtgaaaaattattttgcaattgtcttgggtttccatataatgttagtattggtatacgttcagcaaaatatgtatggcaatctgtatggtagcagtttttcacttttacatgaaaatttgaaattgaacgagccgtgaatttgttattataaaattcagccgttatatctcccccaccgccaaaccgtaaattcacccatctcataaactgctatatgtggtatatgcgatgctgcgcaagatgggatcggccaaacggccatgttggttacaaaactgcctatttgaaaatatacgcacttagtgatgcactgattcgctgtacaggcgaacttacgcggcattcgttaaatattgtactgacccgcacaacaagtcaagtaattagtttgtctattcggacaactcagtacatatgtactgagctgtggaaattcctccactacactactgtcgtaacaggagtctctgctgttgccctcaccaccgctttggtggcagctcctgcttctgctgctggcacaaacagcagcgcctcccacgctccgttcggaaccatcacgtccaagcctggcgagtgtgtcatcggcaacccaaacaccgggtttgggacaaccgcatgaaggcggaggtggacccctacgacaactggatcatggaccacatcgtggccaacaagggcaccgtcaactactgcgtccgctgagacagcaagaccaccaagcttaccagggagatcgcggctaagctccagccaatgttggcttgtcaacacgccgcgtggaaccgctggctcattggctacaactgctggccgtacaaccagatcaaggtcaacattgtcggctgggctgcgagagaggcctcggacctggagtggtcggacgagtcgctcggcaagatctacatcggcgacctcgacaaggacggatctccccagtgaccaaagaattgttaccgttccgcggaaggatttggtggctcgccggagcctagcggctgcgatgagaagcgttcgacgtctcgctgtggcctacgcaggattatggtggcggcttgggaacgtacaatttccagcaggtggacctcgacgacatgcttgcgcacctcgacgacaaggagctcgagatcgtgtcgcacgagatggaccacggcttcggactgccggacttttacgaggagcccaaacccgacaacttcccgcccaccctcatagacgccttcacctcgtccaccgtccgcgacacggacggctggatgctgcgcctcgtgctcgagaacaagaagtccaagtacgacttctgagtgtcgacccaggacacaaaacactagagtttccgtcgcttgtcgctgataaaaaacacctaaattgatgttcgttatcactagtaattcgccttaacgtccccaacagcaaagaattttttttagttttttggcaaccttatagtgaattgacatgtgaggaacttgttgaagtgtttgttgctactttaaggtcatgttgcaacttgggggtaggcggtgtcggttgagtcaacagtccacattaacctcgaagatgcgggtgccgagcgctcggcggttcgtgacggcgctgtgcgtgctgctgctgatgggcagaggcgcccagaagctgcgcctgttcgtcacctctgcgctggccaaattccgcgccctcaccgccgctggggcgcccgcgacgccgtcttggaggctgttcagcgccttcctgggcgacttgagggaccaccgcgtcgggaaagtgctgctggcgggtgatcactgcatcgtacaagctaaggatggagcggatacatacaagtaagtgaaggcgcgttgatccacggtggtttggcggctgtatgagccgtagcacaggagatatggtggatattagtttagacattccatggtataaattataacattctttggtgtatcatgtgacctgtagggtgctggtgccgccgaggaccgagaacacgtacatcctggacgctctagtgcggtcgggggttgagtttggctccgtgacgccgtcgacgaccagcagattggtgccaattgctatagcgctgatgccatttctgtacctgggcctgacctacaaaatgctgcggggcatatacggcacggacgctggaggtgtaggcaaggacggcaccaagaaggtgcgcaagcagcagcaggtgatgcggatctccttcgacgatgtggcgggtattgacggcgccaggaaggagctggaggaggttgtggacttcttgagacacccggccaggtaccaggccattggcgccaaagtgcccaaaggagtgatgctctgcggtccatcgggcaccggcaagacgctgctggctagagctgttgcatctgaagcgggggtggccttcttgttctgctcagcgtcggatttcgtcgagatgctggtgggtcgaggcgctgcgagagtgcgggacctcttcacgcaggcctcgcagtacccgcagtgtatcatctttattgacgaaatcgatgcgttggctaaagctcgcggtggattcaactccaacgatgaacgggagcagacgctgaaccagttgctgacagagatggatggctttgagggaaacgtcaatggagttatcgtcattgccgctacgaaccgcccggaggtgcttgatccggcattgtgtcgccccggtcgctttgaccgtcatgtgtatgtgggtctaccagatgccaagggaagagaggcgattctggaggttcactgccgcaatgtgcgcttggacagcgaggtcgacctgtcagtcattgcggaggagtgcggccagttgggccagcgttcgggggctcagctagcaagtcttgtgaatgaagcggcgttgctcgccgtgcgccatggagacacaagcatcaagcacgcgcactttgaactggccatgaaccgcgctttcgagtcgcagacccgcaacattgcaggatcgtcgtttgagttcacgatggaggaagtgtcgtagaagcacacaatatgatggaagtccaatgcttgaattcttgtggataacgggtggtaagaaaaaaatatttgtgagtgaacattagcggcaacgaatcacacattcctggactgaagaaaacatcaattgatttgtgaactacaacagcaactctagctacgtgcttctttctcgcacgatccagatcccccgaagacgcttagaagtcgtacttgtgcttcttgttctcgagcacgcggcgaatcatccagccgtccgtgtccttcatcgtcatcgacgacagcgcccacatgacgcagggcttgaagttgggcggctggggcatctcgtagaagtttggcagtccgaagctgtggccggtttcgtggatggcgaagtaaaactgctcttcctccatgtgctccagcacaatttcgaggccgtactgctggaagtcgtatttgcccagcccactcgtcataccctccgtgggccacaccgagatgtcgaacggctcgccttcacagccgctggactctgaccagccaccagacccgtccggcgtgcggtagcagttctgcgggcactgcgggactccgttttggtcgaggtcgccgatgtagatcttgcccagcgagtcgtccgaccactcgaagtcggacgctttgcgaccagcccagccaacgatgttgaccttgatctcgtcgtacggccagcagtcgtagccgatgagccagtggttccacgcggcgtactgacggttcagcatcgtctcgattttcttcgcgttctccttggtgagcgagatggtctggctgtcccaacggacgcaatagttgagcgtgcccttgttggccacgatgtggtccatggcccagttgtccaaggactccacgtccgacttcatgcggttgtcccaaatccactggaggtccttggggctgatgtaggtgttcgggtcgccgacgacgcactcaccaggcttggacttgatggttccgaacggagcgtgggcagcggtgctgtttttgccggcagcagcagtgggagccgccaccagggcagtggcgaaagcaacagcagcgacgcttgaaaggagacttgggggcatcgtggataaatggagaatgaggtcacgctggtagacgggattccgtggccagggtgttgcctgtgcgcttacagtaggtaagtacagtaacatgattgtacaggtatttaagtcgcaaaggcgatagttgacgctcacgaaaacgatactaaacatttttgtaacttacttttttaccaggtggtgatggtactcgtggtgctgggggcacctttgctgttcgagcagagctgtcgcgcttcgtgaatgcagatgggtagatcagcagaatggcattgccacgtgatgataatagccatgtacatgaagtgcttactttgtactgtagttattctggaatgcaagctactgtactgtactatactactttgtatcaatacagcgtagcacgtctacttacagtacttcgacaacttgatagctttcagctcatgatgtcagacactttgacgccacatcgctgactcactgcttcgcctttgaaggtccctaccactatacatgtaatacaacttgtagtgcaatacaagtcacgttatacatgtgcaagggttatcgtttcgaagacacattaattgatcgtgtatctcgcacagatctactgcttgctgcactcgcgaatcgtcgacgggtaaaggcttcgaccccccttacatgtacgtatctctacatcgaaccgcacttcgtggcacgaaaacgaggaatattttttacttaagtaagaaatatctgcccaggaacgcaatgatatgcatggggccaaccagtacagtaccaacctgtaccacaaaattctacagcagtacgggtcgatctaatccgtctcatgcggaaaacttacaattcctcgccatgcaaacgaaagcattgttccgcatactcgatcacgtttgtggacatggtaacacatcttttccttcacatctcgtcatcgcagaggggtcacacgtagctgcattcattatcggtcgactgcactggtgcttgcaccattgctagggtgaggtgcggtgggtcgttgctcgacggagcagattggagaatgagctaactctaaactaacctatgtgcagctgcagctggcggttccacgtgtcgcgcgatgggggcctgatcctgtcttcgccgtgcactctctcctcgtgctgagaaaaccggatctttggccttttgccaaaagatacccaattgacttatgaacacacgaaaactctaagtacctcctactccacaaaaccgctccgacacttaaaagtcgtacttgggtttcttgttttcgagaatgcggcgaaccatccacccgtccgtgtccttgatcgagtcaatggagagcgcgtcgatgaggcagggcttgaagttgtcgggcttgggctcctggtaaaagtccggcagaccgaaactgtggccaatctcgtgcgcggtcaccgtgagctgttcctcgtcaagctgcggtatcatttcttcgatccccacctgctggaagttgtaattacccaggcctccgcccaaaccctccgttgaccagaatgagacgtcgaacggcttgccatcacgtccgctagactccgaccagccgccaaatccgtcagctgcgcggtagcagttctcgggacactgaggtgctccgtcctggtcgaggtcaccgatgtagaccttgtccaacgaatcgtctgaccaccccaggtcggatgccttcttagtagcccagccgacaatgttgaccttgatctcgttgtacggccagcaattgtaaccaatgaaccagtggttccaggcagcgtattgacgggtcagcatgtcttggaacttggcggcgtcagccttggtgagcttgatggtcttgctgtcccagcggacacagtagttgatcgtgcccttgttcttgacgatgtgatcgatgatccagttgtcgtggtcagttacatctgccttcatgcggttgtcccagatccactggaggtctttcgtgctgatgtaggtgttcgggttgccgacgacacactcaccaggcttggacgtgacggttccgaacggagcgtgcgcagcggtactgtttgagcccgcagccgcagcaggagccgccgccaaagtagtggcgagaacaacagcagaaacgcttgaaaggagacttggggccatcgtgaatgaatggagaatgaggcagtggaagtgtcggtattgcgctgtcttcatgcaacatgatgttacactgttgtaatgcgctctagtcgcaagacgagatgacgcgcacgactgccatactaatcagcgttcgtcgtcagctttacccctttccaggtggtgaagcacgagctgttttgctgctcgaattcgtggatactgtacagatgccagaccacagcaacgtagctggtgtgctgtatgttcgttattgctttccacagaagcagctatttactaacacgtactgtatcgtaccgtagccttacttcgaagacttgacactgtatgctttcattttagttagtgccggagctgcatatttgacgaccgaagtcaatatttaaagtatgaccaacagcgaggcttggttcaccgatacctggaatgaatgaagaggttatgggggagaacgtcctcacaatattgcccatgcattgatgtattgtaacttttcataggatgaagtcacgacacctctacgagtaatacacacctgttcctacagcaggttgctgtcagtaacgacattccaagttgcaaacacctggtgttgtggaacagccaagaatcatggccgataagggggggggggggggggcgcagcttactttcaacacaataggtcgctcctcgccatcgctttcttttactccgcttccctggcaactgctatgagatgaagatgcgctgcgcgttatctgagatgacggcggtgctgcgaagcaggtattaagcgcgatgcgccgttggagtgcaatgttgtagtcgtgtacaatatgtagtggagcctcgcttccccgccccgcccccctctccgcaaacttgcccgagctctgcagcgaaagctgcgttcaccgccgttgccactgggccagtcgtcgtccgagccttgccgtcggctgcagaagcgagcaattgtttgttgcttatgcccgcgctggaaatctcggactggtaatgattggtgttcgtgcgaactacatgtacggcgggaagcactaaacatatcggcagcttggcaaactagtcactctctttatatttttctgggatatcagtaaccccggagggagtgttgtggccagcccaacacagattaactaggcggcacctcggtagctgaagccggtattatataatacatgtactgaaaaactggccccggtaactgaagttaactgaatatagcctatgttctccatcaatctcaagtccgagagaagctggagagcatttcgaaaattccgtagtcgttgcatttgggcacgagtgctgcgaggaatcgttgccgagatcggcgctgctcgccggtcttcggcaccacgtcgctgatgagcgatgttcttagcttacgcttgttgccgtagctcaccgataggtgccccagcagcagcgagccgaccccgaaacgggtaggccgacggtcggcctctcaaaagacagcatatatgaaaactattggtcgatctggtgtggcaggtcgtccatctacagtacaacagcaggtgatttaaactaactattttagcttctcttgtgcgaaaacacagacatgctccctgacgtcctgagctcaaggagcgaagcgaaagtatccaatgacatcgtctggttcctgattgatccatgacggtggtgtttgaaatactatatcaaaccttgtgctggcaaaaccaccatcgtttcgcagccgcagtctgccttcgactattagaaccgtccatacagttgtggcttaaaccccaacgcccaagttgcacaagcagttcgtagacacaaaagtataaaacgggttctatacaaacgcgaattagaggcacacacatccactctacttacagttttagatgatgtcacatcgacatactgcatctgagaatctttcttctaaactatctgtctgagaacaaccaatgcagaacttgcactttcaggataaaacaaatactagtagaaaaatgatctcccagccaacgcgcagcaaccttgtgagcaacatagaccttctacaacgtgctgaattctcgctggtgttaccggtcagtgcctaaattgcacgagcttcgttttttttacagcacgctgcagcgctggcccttggttcgctaaaattaagaggattgaacgtaccccacagctaggattattcaaatacaattaaaatagtagtgcttcaagacaggggtagtagtaatactattactactgccccacttccgacgcgccctgttccactatcaccgtcctatcgatctgagtaatgtagtgtagggcgttttgctgttagtaaaatttaccagacactaactcactgttagctgtacgtttgctgactgttagttgacgagttagtagcacgagaataatcaggatatatattaaccttaaggctgattgcagttaatgtctttcatacctactaaagagatctaaacactctgcgtccttgaaccccgtcttctagcgaaatatattcgggtcagggcgaattcagctctgcgtcttaaccccttggacgcggaggggtgacatgggcgacattaaaaaacgattaaaccgtcccggacggcataagaaatcgtatgatactcagtatgacatagtgaacgcgagtataattttggcttttcttcacacagtttgctgctaagctccctggtaattattccgctagaaggggctggtgtgatctgcggataaaaatcctccaatgagctgctcacagtgcattctatgcaatactgatatttagagatacgttgcgcctgaacgggtacacattccgctctctcttacatgtaacacaatggatgctatggtattgtcgccttgatggttgctacaagtgataagccctctaggaccaccactatagtgcaaacagcgcgctccaacgctaccaagcaatgcaaaagaagaagagcaactacagagtaagttgatgttgtcttcgcacaccgacattgaagcagagatggcaccacacttcgatcagtcgaacagtatgaattatgtgtgtgagcaagataggagcaacatgagagcaggcatattgcaatgtaatgtacgagacgaactatattcgcgtgctagtttcctgcactatagtgtgactcgcattgctacggttgtggaggatgtgacttggtttcaaagcgagaaggcatcctgtcctgatactttctgcataaagtcaaacgtgtaagcgggccaagtcagcattcaagtaaaaattaactttcacccataccttcaacgcaaaatcggcgtcctctcatcttgaatgtataacttgaagtccacaacattccttacttcagcggcggtcgatacctcaatttaagcagcaggctcctcttcagctcgtcttcagcgccgtccgttcttgggcagcactcaaacacttatcacgttgccaccggaggcgatgctgctcttgacctgtcgttcatgtagacatgtcgtcgtctcaacagccagcgtaatgtacatcttcgtaaaacatttcaataagcagaaaccaatctcaatcggtataagccattccgtaagcataaagcgcatattgtatacctttcacgtcagcaagccaggggcattcacggtaaccgacgcctgttggagatactcgagtccccatcctaccacgaccgcctactgaaggcaacaaaggttagtccagtcgcagcaatcatcccaacgatgcaacgcatacctctagcgttccaacgcccatgacgattcctcgcggcacagtcgcgctaggcaaagatgacgcatacagttctgttagcaaatagtaaaaacgcaagtggttagcatgtattcgaaccagcagaagttgtgcgcacacgtacaaagcagcacgaaaggagggagtgcttgcgccgcggtgcttacaatcagacttcaagtagctcgcgcttcaaagcgatagtcgcactagttagtttgggatctataccaagatacttagcgcacgtaccgagcctttcgtctgtctggggcttatcaggtacagtcactgcatatcaacagtcttaccgtaagactatctacgcacgtaagagtcttacgtgcgtagatgctttcaacaggaaatacagcaccgccatcgctgctaattgaggatctcgcctcactatcagttctgtccgcacgagttggtccttaaaattaaaaacaaccaaacggatgggactatccgttctagactggcacttcaagatctaatgtgacagtaccgttgagttgggacaatgtcggccacaatatcgaattaaaagcgtcttatctcttttaaaaaatatagaaaaccagaaggatcggagcggcgtagataaagttattgaagtgtaaaaatctttagtaatttccgtttttgtgcaaaattagtgatgctcgttcggcaaatacatgttagcaaaatttactagacactaactaactgttatttacacgtacagctgactctacagttagtgtatagggagaaccggactccgagataacacgtcaaatcgggcggcaactgggggctgcagtcctcagtgtcgcatgtccgagttggacttgcgtgactgcttcaccagtagggcgccccgcgcctactgggttccagcgttttttgtttgtccacgacgatgcccggtatcgccgcgtcgaccacgaccaccatctcggtgcacgggtgccgtgcactctcgggcatagtgaccgatccttccgcaacggaagcatcgtacattacttccttcttgctgatgataaccaacagccgttgctttcgagaggtccattggttccggacctcccgctatcgcgaccggaggcggttgcagcctcggcgcattcgcatgcagtttagtctgcctcagactaaaccctcctgcattgcaagagtaatcgcagctttgagagtgcctgggtactcacggaagagataggtcttttcaggcccatctctcagacccttcatgaacgtgacgaccttggtcgcctcgtctatcgggttggtcacaatgttcgagaccaagtaccgtgctctctgcgcgtaagcatggacatcgtgctaaccctgctgtaggtcgaggagctctgacctcgaccgaaactcattttgcgggggctcaaacgcttgcctgagctcctccttgaaaccctcgtacgtgctgaagcacgtaggatcagagagtcgacgtccatacgcccaacttctcgctcgtctgccaaggcatgacatggcgaacgcaaccttggacaacgagtcgacgatacgtcgagccgcgatggcagtgtcgagttcgacaagccaacggaggagaggctcgccctctcttccgacatagttgctcacgtttagcttcaacgatcgtccacgcggtgtcgtctccgacgccaccgtggtaaaggaagcagcatcacgctgctccttcatgatgaaccccagagcaacaccatattgctctgtcggcgatagcgtacgcagcattgcagctacagccgcttctcccatgactgttgacagtcgttggagcgcctcccactctggatccgacagctggaggcagtcagcgcgtgcaacatgagttgcaggcgaagtggaactttccatgggcacctccgcgctcatgaaaaggttatcggctcctcgttcgtacagctctgtacgaacgttcaggtagtcggtcgttggacgggctacaaagtgctaccagatgtagtgggcctaccttggctcactactacggcttacacgtatgcgcacgtgtatgaggaagcgtaggtttcttttacttgagttaagtttactcgagatccacgagtatactttaaacaagataaagactccaagtagcctatttttgttttatgtttctgacttcctctaaatgtaatattctaaactaggaatttgccaacggctggttggcaggattctgctaacatgcaagtcacgcattggctaaaagatgctgctttcagccaataggaatcctaaatgtgcatggaccacccgtcgtggtggtcgtaaatgtatgtagccattggtgtaccttacaccaaggtcgaggaagtgttcaaacctctaacagacatcgcatctgttagagtaacaagtgactgtagccacttgtgcgtgtaaccccgttacaatcctggtcactgcgactccagacatcttagtcctgcttcaaagcatactctccagatcaacgatacttctgaatctctgaccttggggcgacgtcttgaggcgcgtgtccctgagtttcgtgataaatctccggatatgcttctccagacgcttcgaagacttgcgaaagtcaatgtcagccttcccagcggcggaatacagacgatagaagaaatccagggcgctctctgaggtcttcatctccatcgtgaagtagcgttcagagtacgacgagcgcgctttgcagtacgtcctcctgaatgcagacgacaactctttccagtcacgctgagtgtgcttgggcaactggttgaaccagtcacgcgcagctcccgagagtttcaacttgagttcctgaattcgcatcttcgtagaccagcctccctgagccgtcatgttcgcataacgctcccaccaatgcacgcgttctctgagtgacgccttagtgtcgaactcacccagagtattcgagttgatgtacggtcggaacgtcaggagcgtagtgccggcttgagccgtagaggccgtcgtcaggttagccccagggttctcgtccgaactgtcatccgaactctcagaggacgagtcattatcgctggaatcggagcttgggtctgagtccgagggtggattgacatcctgacgcttcttcttctgctggtgtttcttgggcgcagagcgcttggagtctgccttagcgtcctgcgaggcctttgaggccgctgttcttctgggatccgacgtcttccccagagacacaggctccagcttgatatcctgcgtcaccttggtctccgcagctccatgtccccgcttgccgcgcgcaattctgccggaagtgtcggcggaagtctgcgcgagggtcgctcttagctgggaggcggcgacttcggaagtgttcttcggatcagctgtctcccgtctctggcctgcgacacttgcgtttccgttgattacgccactggattcttggagtcgggttgcaacttcagggttctgagcccctgggtatccgagatcgctgagcttaaatgtagcatcgagatgaaaaatcaagaaggattccttccgctgcagcgctaaaacgctttccattaatttgacgcttgtcatccccaaaaccagtggctggtcatcatcgccgtttcccacaaatggaacccctgatcgtcttcgcgattcccgaacacgaatgctgcaccagggtctaaatcggccttaaatgcttttgcaatcactaactctcgcgttttggcaatcgaatgcttcgcaccttgcaaccatcggttgtatcgcacgctgcgctgaacttgagcacacgttgggaactctagaacaggagtcgtaatctccggtgctctcagcatgttgctccatatcaacgggggggggggggtacggcattttcgtccatgcgctggatgtagtttcgcatctctggcgtcactttgggccgagggaggacggcgcacgccatttctccgcgcacgtgaactttttcattctgaagaatcacccaggtcgatgctgttttgcaagtatgcaccttccattgaactctacacttatttcgacctgcgcgttctttactagttggactcttgcagtgcagccgacgttcaatcatattgtagtctcctgggcacagattgcactcctcgtcctcactgataatacagcagagcagcagaagttttccacctatacttaacgaagtcaggctccaggtgaagctcggcgcgcttggatcacttttgcttcggcggcatcgtgctgtttgggcagaaagagcgttaatggctgtggcataacaaaaatgaacggagcgtacgattcacggcaacaatgtggacaacataaaatacgatcagactgtgcggtttagcgtttttgctaagtcgaattattttgagcactggtttcaaataatctgaccaggtcaagttattttgagcactggtttcaagtaatctgaccaggtgaagttattttgagcactaggtcaagttattttgagcgccgcgtttcaaataacttgacctggtcagattattgtaaacgccgcgtttgcaaaacttgacttggttagattattttgagcactggtttcaaataatctgaccaggtcaagttattttgagcgacacgtttcaaataacttgacctggtcggactattttgagcgcgttcagaataacttgagagaccatactgtattacagtacactaccgtgctatccggtcagattatgtggtcacttacttgatgtttctcccaaggtacaaggtaccactaaacaactggtaatattagaacattcgcataacattctctcctgagtctatttctgtgcatacccattgaagtgagttgtctgtttgctagtggtcagtaatgtgtttgccaatgaccactttccgcgacaagtgtttggtcgtgtcagtttgtgtttgctagtggtcaaaaagtgtttgttgttggccagaaatgtgtttgctgttgtaccagactcaatgcaaaagatgaacttgtcgcagtcatcacgtttgtcgtaatggctgcgaccaatagtgctgctgctagccacgctggagattgcctccactacaatctgcaaggttgactgttgaaagttcagcgtagcttcggcgaccacttcgttaatcacgtccgctgaaatctccgtctgcttgcgtagaagattaaatatcttctgtcgatcgtagcagcatttttaaacgtcaccacaaccgattcggcagagctgctctcgttgcagaggataaactcgatagcagcagcacttcttgcactttcgaatgctgcaacttgggaggtccactcgacactcaccatctaggaatgttaagactgctggatcgcggaacgtagccgcactttcaaaagccaaatcaaacgtttctggtgaaatcgacccacgtctgatcaaaaccctcacaatgctgatgcgtccgtgacccgctgcctgcacaaatgcttcatcgaccagctcaggcctattgtggcctttcattaaatgtacgtgattccattcaagttgccggtgacagcgagatggcagaacagagttctgccgtcatacatgggggacttggcataaatcaactccgcaatagcatcttgcccacagtcaagagcttggtcgatttctctggcgcagtcccacaggtatcttccgggctcgagcagaaatttcgcgaccacttagggaagcacttcacatggctcatctatttctatcctgtttcttaatcgcgcggattgcatctcacctaacctatgtatgttttccatccgtttttgtatagcaagtaagccgcacccaatggcttcgtcacggactttgacgttgtgttcgtccagcagcaatcgaaaccatttcagatcatctgttccacctccgccttcattgcgtagattcgatgatatttatgacatgatagagcgatgcaattttggtggggaagctcgcgaattgaactcgcttgaactcgtccgcattgtatccaagattgttctgcaagtggtcttcttttgcactgcagagagatgaagagaaggaccttacccgtcgctaggcatcaatcgcatcacgaagcatctttcattgcgtactgactaagcaagctaaggggtactactttctgaaacgtattttaccgtagtattatcaagtataatctgaatgtagtgaatagactcagactgcaaccagcgcagtaacatcgcatttcgaacatcgattaatctctcttacacaacagacgtgctcgtacctgatgcgagcagtgaaactgaactaagaccacttggatagcttacttaaaattgtagcgcgagcggatatgttcgtacgcgcggcgcaccatccagccatcgctgtccgtgacagtcatggagctgccagccatcatgatacagctgggccagtcgggattgggcttctccgcctccgagtaaaaatcggggagaccgaagccgtggccgatctcgtgggcgacgatcgtgagctgctccttatcgatagtctgcagcatgttttcgaggttgacctcttggccccagtcgtagccgaatccaccttcaagaccctgcttgggccagagcgagaggtcgaaaggctcgcccttgcatccgctggtgtcggtccaagtctgaggaccattgtcgtagaaccggtagcaagtttgaggacactgcggaaccccttccgcgtcaaggtcgccctcataaatcgtaccgagcgagtcgtccgtccagtccagcagagacgcgtccttgacagcaaagccgaccatgttgaccttgatctcgtcgtagggccaacagccgtagccgaccaaccagcggttccacgcggcgtactggcgctccagcatcgcctggaacttggacgcgaccgtcttggacagtttctgcgtgctgtcccagcgcacgcagtagttgagcgtgcccttgttcttcacaatgtggtcgaagatccaattcttgttgttggtctggttcacacccatacggttttcgtacacccagtcgatgtctttcgttgtcacgtacttgttcgggttgccgataacgcacgcgccagattttgacgtgacggtgccgaacgtagcgtgttcgccagtgctggtcgacgtctgcgtcgcatccgatcctccctgcgtcgctgaagactccgtgttggacgaggaagccatcgacggttgcgccgtattggatgaggacgccggcgattgctccgtgttcgaggatgaatcagtgttcgaagaggaggcagtagaagaagtctgcgtctcaccagtgccacccgacgtcgcagtgtcggacgaagacgtcgtcgaagtcgacggactcgtttccccgctctctcctgaagcagcggaggtggccgtgtcagacgatgaggcagtcgacgaaggctggccttggtcgcccgttccgctggacgttgacggtgcagtggtggtcgtcggcgcagttgaagtctcggtcgacggttcctcctcgtcagacccgctgcactcgaggctgtagtcgtcatcgcccccctcgacaccttcgtcggagccgctgcactcgagactcatcccctggtcgtccgataccccaccttcatcgctcgaaccactgcactcaacgcctagagttccgtcgtcgggtccactggactctccgatcgaaggcgctccagtcgcggacgatgctgtggacgtccaacctgtctgctgcgaccagccttggtctccagttccactcggttgtccacttattggggtccaaacggaaggagtgtccgtagtcgtcggctgtgaccagccttggctgtcgctaccacccgccggagttggctgcgaccatccctggttgctgccaccgctcgcaggagttggttgcggccagccttggttgctgccaccgctcgcaggagttggttgcggccagccttggttgctgccaccgctcgcaggagttggttgcggccagccttggttgctgccaccgctcgcaggagttggttgcggccagccttggccactcccactcgactgagtccataccgacggggtatctgtcgtctgtgacgttggttgagaccaacccccgcttccgctagaagcaacagtgggggccaccgtcggcacgttgttcgaggaggatgctgcccactgcgtcggcgagtcgaaattgccaaagccgttagctcctgtcgtggacgaagtctcccctccgggagctacggtggctgcagtctgtgcgatgtcattctggccgctgaaatcgatggcggtcgccgtgacggccaaagtggccgtgagcagcactgtggacgcgcgggggagtcgacttggcgccatcctacaaaaatttggcaatgagctctcagtccgaggtgatctcactctgtgaggaaaggtaggacaaactacaatagcgattagcgattaaccgactccgtggttgacggggttaatccggacacgaaatatcgacagaaatgaggcaacgtgcagttggtaatgcgtcgtcgattatctcctgggtggcactcctctacaagtcttcttttcttgggatgggaccacttgagactacatagtaacagcttaaaagacgaaacacagcggatagccccacgatgcgccaccaacgcgattccttgaagaaggcgatcgcaaacatgcttgcctgcccacaaaggcgatatcgcagcctttgcccccgttacacttaatgaattgtacgtaggggcttgcctgccaacctgactcatgcgtgtcgtccatcggaagccgttgtctacatgtattaatttaatcaacataccctacaagtacgtgtacatacaaaccgaaggatctgttttaacagaaaaacaccagactacactgttcgagagtacgcaacctgtgcatctccggaacccaccagtatggccgttcgtaatactgtacatatcatagaatgcatgtgccgagaaagcatcgtggttgacggatcgcacatgctataatacagtatacagtctccgccgcaagaaacaaacacatggactcgcactgcagtagatttgaaaagagcaaccaagaaaaaactaaacatatccatatactactatttacacgttagtatctggaggactgatattataatttgctagcgataacacttgctcgtactgtgcgctgggtccgatgttgttggtatagattcaatccagctcgcgtatccttgtccgaagtttccaaagccacacacactggcctttaagaagatgaagctcggacgtgttgccattgccattgcaactgctggtgctgggctccagcattgtattgaaatctccctgcgccgctggcgaagtcatgttcgaggggcaacgcagtgtccacatcgcgcagctttcgatgaatgccgtcgatgtcctgttcgatacgtcgttaagttcgtgcgatcgcccctgagctcctccaacgctggaggaggcagtgggggtacgttgctcgaggatgaagctgtctgctgtcactggtatgccgacccaagctgctgatgcattgcatcagcagctccagggctacggtggagggcatcagattgggttgcgattctctccgctgaagtcaatggcgatcgcggtagccgtcaacgcagttgcatttagcaccggaagacgagtcctgacaatggatgaacgatcgacagcacagaaaacacacaaagctgtgaggtctctaataaaagggttgcacccccagacccccgcattagagaaactaaatccgagtgtgcggcaacggccccgttcgctggaatactcgtcgctgggcccgcctacgcaaataccgcacggccctgcttcgcgggcacctcacgagggtttgctacggctacgctcctcgcacccgccactaccgccttctattcggatgtatattgtcaccatcgttgtggaattcacggatctgtgtgtgttatttatattttctcagccaagcccaccagtgcagggacccctcctgtgaatcgaactttgtagtaggaattctgcgtcctacggtcccatctcagcgagtctcgaacgtcgatacccgtccgtgtggacgcgctcctttacaagctcacccggaagataggggagtactgtaatgcgttcgactgtttgcagttataacgcgtctaggcgtgccgtggggactaaatacgaaaaatacccaaagattatgtcagaaataccacagaagcacatcagcaccattgcagagaaaggagaaatccgagtccgggtcgaccaaaggacgacagccaacagcactcttaatgtgcaaccagaacctcaaatagcaacttcaagtcagcacttaagttgcaaattcgcaactttccgccacctgtcacacattctctcagccacatctagagatgttaaatcgaccaatcggattgatcgaatatccccgtctgaccaatccgatcggatcgggttgagtaacgactgattccgaccgattccgactaaattccgactaatactgttcgtcgatatatgatgacaaaggtaaagcctgttgaaccagataaccatggaactatgataacgagtaaattagaatataaagttagttcagcaccattcgattggctcaaatcagaacgaatatttaccaataagatagcattctccttatctttatatccccttcatgcctggtatcgcgtcggagccgttcttcggttgcaagcgcaacgtcgatacgggcgaggttgtcccggcggagctggtggagttgtagtacggagacgtgctgacgcgcttggtcgacttgacatacgtagagatggaaggtaagccgcagtgctgggtgcacggcacgtacttctcgcgcgtgaacaagctcatcacgcgcacggaggaatgttcccgccgcgagagctctggcgcgctgttcgaccagtcggagctcaagtcgaacccgcgcggaacgctgagcgcgtttatcgcgaaataaccttcgacggtgtcgacgctgctgtcgctgccggactgcgacttcttcctggagctgtgccgcacgggtggaaagccggtgaacttcgtgcctgcgatcaccaaggacttcaagacgtggttcaagaaggcccctatgtagtactcgaaggacttgcggtggcggagcgcgtcgagcagcgcgtgttcatcctgcagggccccgtggctgtgcactacagcacggtggtggatgagcccgtggcggacatcctgggaggcatcaactcgggcttcatcaacgttgtcaaggagagcagcgcgatttctgccgcgtcggttgcggctaccaagcagactgtagacatcgctggagttgaggtcagggagagcgacggatgagagcgccattccgtctgctgaagagtggcttgcggcgctcgccgcgtccgtgagcgactaggactggctgaaggcgctcatctcgtcgacccacgtcgtgaaggagaagaagtggcttgtgaacccggctgcgccagcttcttgtcccccgggttggccagaagtacgtgatcgacgctgccggcattcgagtgttcgacagatcgatcgacatttcgtgatcgagatcgcgaagaagggcacagcgagtgccgttgtggtgaatgaggtttgcccggcagtggccgagctgaaaatcggcatcgtgtcgatggagatgacgttccagcaccaccctgagctgttgtgctcgatccacgctaagggcagcggcttcatcgacatggcgatggccatcgaggacaagaaagaggattcgtgcgaggctgcgtgcgcggagagcgtgatgtctcgcgttcgccatcgccatcggcgagcagtcgtacctgcccaaggtcgacagtcaagacgacgccgcacgttgggtcaagggcctgcaggcgcggcagcaccggcccgagggtataccctccgaggtcttcagtctgcgcagcgagcacatggacgccgagagcgacgcgtccagcgagtacggcggccgacgaccccgaggcacgtcctcggactcgggcggtcggcgctcgtccctgtccttgtcgtacgtcgagacgcagaatcccgtggtccccaacgccaacgctctcgcgcggctctcgctgtcgcacgccgacgccccgaatcccgacgtgccgaacgccaacctgatcgcccgtgcgttgttctcccatcccaatccagtggtcccgagtgccaacaacactgccgctactgctgcagctggaccaaagtatccgatggtgaattccaaccaacaggtcacgggggacgactgccgctggaaaaccgcaggacgaagagaatccagctgcgaaggcgctgtgctgtgcgccttgctcgatcatataaattgcgacgtcaacaagaggcgattggttgcctcctttttccttcttctccttctttcgacgacggcgcaagagctggagggtatcggtcgatctggccgtggtttggtcctgactctcttgctacctggtgcgacctgcctgcccatttctgcctgccaagccgtcttttgtagaccgtatcaactccatcgagccggcgcctcctgcctatggaggatcaccgtagctggctattaaatgtactgacgaacaacaggcaacgccgtgggatttattgcagcaccatgcctgctgtggcgtaccatccaaagctccaaagacggtggtataaatcgtcgagttcctttcctctctttaaatcgttctgcggtccgttgctcgactggcacgatcctattgccgttgaagttgtcaaccagagctccgggtgtaccctaatatgggtacatttgtgtattcacacataatcgctcgacaccttgatcctcgacatgcaggccaccgccagaagccagcgcagtcagccatgggcagctccgatggtgcgtccccgcagcctctgagactctgttgacagccgcgccgcctccttactgacctctactatgctctgcgacgctccatgcgtctctgtgggtcgctccgtgcagaggacgagcgcaagaagcgcagcatcaacgagatgttcggcgacgaggactcggacgactctggcgacgagcagaagcccgtggagcgcgaggcgtcgccgccccccaagcgtgtcaaaaagtccgggacgacgatgccggccgctccaagcgccgcgacgatggagacgagttcgactcgggcgaggaggctgtggccaccaaggaggatgacgacttcatcgacagggacgaaggcctggctgacgtgttgggcgagtacgacgacgaccgccagcagttcgacgacgagcggccgctcggggacgagcccgagcagacgcagcagcacaaggacgacttcttcgaccggggctcaagtcccttaagacggaccgctcccgcaccaagctcagtctgtcgccgcaggagatggagcagatcacgcaggaggtgctctaccgcatggacaaggcctacgcggacgacctggccagcatcgccgagcgccgcccggccctggagaagatcaagttcgtggacagcactctccatgtgctgcgcaagctgcagctccagctcatgctgctggacttcgacctgctcacggtaaggggttttggtggtgaggttggtgggggttggagtgtaaggctaatgattgtgggttgttgtcgttgttgtgcgaacagatcgtgaagaagtggattcagccgctggaggacggctcgctgccgaatgtcggcctgcgtaccaagatgcttcagatggccagcaagatgacaggtatgttgtctacagaatgcatcgcagaaattggtcttgtgggtacttaaaatgatgtggattttgttttatgcagtgttcaaggagcacttgaagcgtagtggtcttggtaactttcacggccgacttcagcatcacgaaggaggatatcctggcgtaccgtgccgcactgggtctcagcgtggacaaggtgggcgcccccaccgacttctttacgatcgtgtcgtggcgtccgctgatcaagtcggtgttcacgaaggaggtgaagggcaacttgctggacctggtgcacctgaagcactcgcacagactgctgccatcccgcaagatgtccgcgacgttcattcctggcgacgacatcccgagcacgtcgaatgtcagcggtctgcacatcggcgactgtagcagtgcacggtgtggtcatcatcttacgcaagacggtggacgagcaactggaggaggtgctggagccgctggtggagctgcacggcgagttcctgatccgcggctcgttcaatgtcttcgaggcaaccttctcgatcgacaagttgacgaccgatttcgtgctcaagcgttaggaggatgtggagatcctgaagctgaaatcgtggccgaagctggctgccgaggcatcggtgagcgtcggtgacaacctgtcgttcgagcagacgatgaagaagcagtacgcgctgatcaactcgctgagctctgtggaagtgtcgggtgtgctgtgccgtgaggaggctggctcgaaggtggagatcggcacggttgagctcaagagcaacgaggtgaacgagagccccggggtggcgttcctgcgccaggtacagccggcggacgcgaatgccggtggcatgtttgcgaacggtggctcgcacgtgccagagagccgttggagatcaatgtgccgacgaacgcgctggcgtaagccgtggcttcgcgcgacctcaacccgattaaccgctcgaagtacgccgccatcctgggccacctgccgaagggcaagccgatcatgcacggtctgtggaccgtgacgaaggtccgcgacctggtcatcgagagcttctgtctgcttcgacagcaacgtcgttgactacgacgtgaagttcgacggcatggtgtacccggacgagaagctgttcatgtaggcgcgccacatcggcctcgacgacggcaagaaggttctgtcggtggaggttgtgaacggttccggcgaggacgtggttagcacgcgtgctgtgatgatgcaggcgccgatggcgtttgtgttccctggacagggctctgccgcggtgaacatgggcatggaccgctaccaggagtcctcagttgcttgcgagatctggaaccgtggtgatgtgacacaacactttcggtttctccatcctcgagatggtgcacaagaacccgaagtccattacggtgcactttggcggtaggtaagaagggttgcaacattcgcgaacattacatgaacctgaaatgtgaagaccctgtcactggtgaggttaccccgctgttaccagagattgatgaagatactgagagctacagcttttcggcaacggacgcggcggagctgattcctgatgatgcctatcttgttggctagtccctgggcgagtacgctggtttttgaactccttcgtggaagcgctatactcatggatctagtattcctgcgtgcaatcatcatacagaaggctgtaacgcgtgacgctgagtgacgctcggactacggtatggtggcaacgaaccctacacatgttggcccccacttcacggaggaggacatgtggacggcatcgaggctgcttcgggtaagctcctgcagattgtgaacttcaacatccagcagcgccagtacgtggttgctggtgagaacgtgaacttgcagacgctgtcgctggcgttggctgcgttcaaggccttgaagtcgaccgctccggaggaggaggaagaggtgatcgcagagtcgctggcgcaggctcgcgctcgcaaagagaagtgcgagcagagtgggcgtccgtttacgctgtcccgagacctggcgacgaccccgctggttggtattgacgtgtcgttccactcgcgcgagctgctgggcggcgtgccgtcgttccgggcgatgctgcgcacgaaattcgacccgcgggtgctggagcgccagctgtcgcttctggtgaaccggtacatcccgaacccggtggccactccgttctcgctggagcgatcgtatttcgaggaggtgtaccaggcgacgaagagtccgttcttggcggaggtgctcgacccgatgcagttgcagttgacgacgaaggcccagcccgcgcaccttctggtggtggagctgctggcgtaccagtttgcggtgcctgtgcagtggatcaagacgcaggcgctgctgttctcatagagtggtgttcatcgcttcgtggagattgatcctgctccgacgttgacgaccatggcgctgcgcactgtgcaggttggtgacttcccgtccgtgccgcgtgagattctgtggtaccagcgccccccgcgaggttgttcacttcgaggaggagacgtcgaacacctctgcatcagagctgccgaggctgcggctgaggccgcggccgccgctgcgaaggctgctactgcgtctgctccgaaggcgaaagcggctcccgcggcgccggcccctgtcgctgctccggttgttgtcgccccggtggctccagtgcaggctgctcctgctgcggaagacgcgccagttgctgcacttcacattctgcgggtgcttcttgctgtgcgtatgaacaagagagcaaggaagccatggacgtgaagacgatttgcgccggcgaggcggtggtggagcacgatgcctgaacgatctggaagggagtgcggcattccagagggtggcgaggagatgacctggtttcgaacttcttggtctacgagcgtggtgctgggtaacgtggcgaaccgtttgctgaacaaagctgtggttttggttttccgacatcaagggcaatttgtcgtgaaccgttggcgagctgctgcatgggagatgttttgctgcttgatacaatttgtgcggagaacagtgcaaagatcaatttgcatggtgtttggcaagtgctgtgctgggaccggattatcgaggccgaattccattactagcttttggttgcttcaagtttggctgtggtctcgttgaattgcacgaaggactgcatctcggataccgcagagacagtatcatctccgagtcttgctcgccgaacacttacggtggagagaaagcttgctcacttgggacggacgtcgccatcacagcaagaaagtcccgagccatcatccggattcttgggaactggtagagggtgcgaatccaggcacacactgcactgctgctggttttcgagctaatggtgggatcccggtgaacgagccaacgatcaagctctaaagcaaacgactctcctccatcgaacccagtaggctcgtcatgcccgaagttgtcgtccagcatttggtgcaggaccttactcagagcgacctcctcggtgtcttgctggttcaacgtggaggcactggtgccttgacttgacttaactatgtgtgggatctcgtctaatcacgctctgtaccactgaggttacggctatgacccccccttcctccataacttagtaagctgaccactttgtatgtattacttgctacagaactcttccacctccgccacaaagtgtcgtcgccatgctcgatggagctcgcagagcatggctcccaaaggctactcctaaaggctcacgagctcatgacgcatccccccttatatctcaatgcaggcgtctaccaatgtaagggctcctgagtagatgtattgttgcttgcctataccaataggacacgcaatagatagctttacctgtctgaggctagtgacaagcacagcaccacaatgtggtggctagaggacgcgaccgccacgccttctagcctgcctaccgcgttcctaccaatattcaccgcttgtctcgttgggtgcatttcgcagcagagttagtggtggggccatgcaggaagcttctctacggagtcgcccacacactatgatacggtgcctgaccggccgatttacctgcgagcggtgccataacgaatgtcaaacgctacccgccacatacctacgccagggtatatacgtacgacaaataatggtgcggggaagcagcaaagagaaggaagagcccttccgagcactgctgacgcgcggtgtgtcctcccgatcaagtcactgaggtttcacttgaaatcagctgtttttattttggcaaatcatatctagaaaaagatggctacatcatcaggattggtagaaacagtgatggccattaaactgctcgtgggccatggaactgatgatttgccttagctcctgtacgtcgtagcgggtggtgggccccgacatgcatacgggagctgtggctgaagcttcgctgggatcaagtactgaactcagtgtaatatatagacttgtgacccaacagtgttaattgtactccgggtcccgtcacaacgcccttcgctgtgctacggggctcgacgggaacctactcaggtcgaccgcggaacgcacgacctccgctttgcttcggtgtgcatcctggtcgcatataaagatagaacatacttcgcagtgcaactcctccggcctacgcgccgaccactgcagacatccgctccgctccggttgcaaacagtctctctaaggcctcactcagcagggcccgccttaggcgggcgttagtgcttctgtcacgtcaagagtatcctgccaaaattgaatttatctacatgtatgctcacttgttgcggtataacgggtagcaaactcttttaagtagcacaattcagagcacgaccactgtatagaggttgatagcggtgacgtctacctagactattgaatctcagcccgacatagcccgactaattctgccaagctcgactaattctaccgagcctgacgagtccgactcaatctgaaccaactcgactcagtccgactcagcccgactcagtccgacgcaacccgacccaacccgatcgaacgtgtggttgccagcaacattcgccacgtcgtctccgccaagtatccgtgtccccagccctcattacaagccctcttccattcgcggccgtgcttgctatccggaaaccccttggtaaacgcagacgaacgacttgttccagcgagtaagacgactcagccgtggtagcactggtcgtagttatcgagatgtttgagcgcctcacggaagcctgcgaagtagcgtaaataatagggcaatcatcttagtcgtaagacgcggtcgcgttgaatcgacagcacgtacgtacttgggatgatatgcccgacggttagctatttatcaggtcagatacgggtagggcatgatgcagaggtcaggcagtatatccgaccgcaataccaggtcctaccagacatcggaccgctgtgataaaagcgagagtatattgaaattatgatgtaaggcaaaatatgcagtaaggaaaatagatcacctgtatgccaatgcgtcacacggccattagacgacggttgaagctgccagcatggagtcttcatcgtccaaacggtgtggaccacacctgcctgcacacgaccgttgccgtttgtatcgccatcactgtcgaggtccagctcctccgagttgtcaccctcggtactcgactcttccacttcatttggcagctccaccggcactgggagttggatagcctcgcggcgacgtcctcgagctcgaattcctcgaacggcagcaatcgtagccacatactcacgcgatatggcctcaattgtggtcacgaatacagccaagctggggtgcggtgtcgaaaatgcgctgttaagctccctattaaacctttgaagcgggttgttcgtgcgtgcaacaaggcgctcggtcaggccgtgaacattccaaagagcagggtcgtgagctacagccaggttcgcttgaagtagctccagaaaatgttccacttcgaccggacgtacgctacaccgtcgtttctacagcgctctttgacctgacgtttaacccagctgatgccgccaacttcgacttgctcaattggcacaactgtcaacatgtccaatacacccggagccatggcgataccagccgcgcggttggagataccaatgcttttcatcttcctgcggacggcttgcttaaaatgaaataagcagccgatgatatccgcgtttgggaactggtctccgactgcgtcgatgagggcgcgttcgaagtcacacaccacttcggcgggttcaagtaggcgatccgatgcctgctggatgcaaaaatataatgccgtgtaggtgtccatggtgcggtgcgtggtcaacacgtagaacaccggcacaaaacaccccgaagcctggtcgtgcaccatcaccacaacgcattgctgaaacccacgtggcacgcacctaaacgtgccatccacaaacagcgatatacccgcgtaccggagcagcgaaatgagctctgggtgagcccagccaataattcggctgggctgatcgctgtcgttggagccactgatgtggtgaaattgaaaaaagttgagaggccggtcgtttacgcgagacagtggtggcaactcgatacggccgtgaatgttccccccgaaatggcgattgcgggcgcggtatacccggctcagcacttgctctcgcgacagcccgaccaatgcctgctgttgaccaccaccgtaaacctgctcattgatacgagaccaaatagccgtgactgacaacgcaacatcactgcgagccaaactatcaacggccgtcactgcgagccaaactatcaacggccgtcactgcgagccaaactatcaacggccgtctgcataggttgtacgatgtcaacagggggagtcgcagcaatgtggtcctcttgacaactgtgcggacaaagtttgcatactccatggtagcagctaagaactcgaccttgcccatgcaccgcatcccccggtagtagctgcaacggtacgcaatcttgcggcgagatgaccacgcccgcgtgtaccggaagccgcccaggtgaattgagctcaggctacgctcatggcactatgtggcagtcgctcttcagcttggcgcccatttgggacttggggtcggctttgttcagcaggggggtcttgaggctgatggcggtggtcacgtgctggtgagttactgacttgggtcgcggcgatgtcttcgtcggtgtcagggtcggcgtacgccatgttgcggtgtgggggctggcttgtgtgtacttgtgagcgagaagcaaaatgacaactggtagcagagtccaaagtacggtggttacccgcgccggtttgtcgtcagcacccaaagggtgcgggtgtttcaaaacggatgaatgccttaaaacggatacgatattgcgctctgtacatgttcattattttcttgatactttttaaaatttaattgcaaacaagggactaaacttgagagctaaaacgaatcatacatttgtggagatactattcaccttcacgatgcaggtttctcttgacctctttaaatagaaaagtcgcgggctcctgtaatgggaatgggcgtgggtggtgtggtcggttaggaatcttgaccgtgacgtatcattgaagccccgatcccatgtgcttgcatctgtgaggttgaatctgttgcgccttctggcaaccacacgacctactgcattgctctccatactataatagtaacaccaggtgagttcatgtaataatacagctagaaaagtactacggatctgcatgcacgataggaagtacagtgcctagatgtacagaaccggttggcgactacatgtattacgaacaccaaactgggatccgcaacttcagacagtttcagaagataagtgtatttagaacgttgaagggaaactcaaatttggttttgttttagcgctccgagagatggcaacagtcgattctgcaatcaagacccacaaggcgccacacacgcaaccaatgtcctcccctccacttccaggtattaacgcgagatcagatcttgttgtgtacattttacgtttaggattacgtcttggtggatgcaactacgtacggtaaacgcgtactcctttggcgatgcttcatgagtacatagtgaataatggtggtggattagacagttttcatggcttcttcctgaaatcactcttggcagttcgcttctttatttcattgatattgcctgcctcagtcgcagaaggttgcatccaacacgcttccccccagtttgtcgatctatggattctcctttgtttgatgggggtgccgctggcctagaatactaagtgtgtccctcttgaatcatcataaacatcgaacggtctgggcggaacgaggctgtaattacatttcgcccgagctagcacctcatttaggaaagcaatttgtagtagcgatgcgaagtcaacaagcgaacgaagcgcatactctagtttactcacaccttgaacaaaccaaaccatgaaacgtgcaagaaattggtttgctcgtaaactacgcagatttccgaaccaaaattaccgctttcgctggtttgtggtcagatccttccagctttcaaaccacgagcgggggttcggagttatgtagcgttacaggtttggagttactgtggcgctcattggctacaaaaggctatacataactaaagttgtaaaagatattagaattttataaaataataaataatagaaaaataatatttattaaaaaacttgtacttattaacatgtacaaagatatcgcacactttcgtaaaggtccgcatttgttgaaataaattctcgggctgtagaatacccaagtatgtcgttaagaattgatgcacgagccacaattaatgagcaccttaagatgcacaagagtttggcacagattttgaagttgctcgaagtgagctacgactagcccgcataatattagacggcgtgggagaccagagattatctttaaaacacgaccaactttccgggcattcagcgttgttaacactgttctaaagtagcgaattaccgctgctaagcaacaattggatactcaacagaccaagcgtatgcaaacaacgcgtctagttttttttttcagatttacagaacatttcaaaattggcggagctgcactgttgttagggatctcattattaaatccatttacttcttgtggtcatcattgatgacttgatgactcatcaagttaacaacagtaaatcatgttgaccattcttttttttctcacgagcagcattgcagagaacttggtgactcccgtgaactaaatttttcgtgtaaattgaagctggaaattcttgttgcacgtgccaagcgccaggggaggcagcatcataaacagctattgctagttttgatcctcagcccacacaaaaggacgacccatgccgctttcatgaaaccaacgcgggccatccaacaacaaaaaaactagccagttcatttcgtcgtcactggcaaaatatctactgccacacgccttaactgattgtgagtattatgcgagctcttgtgactcagcattgaattccgtacccctacacagcagaacgtactatgaaacaataattacgaacaaatttcttaccaacaaatgagaattcataacgtcctcctaccaattcataacttcctccttccttaatgctactcgagccacctcaaagcagtacatgtgctcgtatcctaaggtttttgattcacgggtaaaaattaaactaaaatgccgcagacagttagaaactatgatgacgcttctggaagatgagtgcgagagcaatatggacaatcgagttcaacgtagctctgaacagcaataagttatgctacctgccagcgtcttcaagagtgtctgcacgaattccccgctttatcacgcctgcaccgttttgtcgcggcccaccctcgggtgtttgctatatgcaggcgcgctctattaacaaacgccgagggagctgttcaagcaccacccagcgcttcggatatctcaatctaggacgtcaccattcattacgcctctcttagctccgtagtcagaacgggttttgcttatcgagaagtcactaacctgtaacaaggatactttctactgatcaataagataatgcactgtatgttaaggaaactacttatgtagatagcctatctatcccgagcttgcagtagccaaattgtgaacgcgacctacgtatcagcggaccttaagggagctttagagacggaaccacttcgtcttgaaagtgcaaacagaagcaagccgttggtgtgcgcacaaacttagttgttcacgcagacgaatatcagcctcttttgatctttcttgagagacttcgcatcaaattcgccatttccactggtcacggctagtgctgtgatgcgatcttgcctactttaagtacctgtaaacacatattcccgtccagcgctcgaacgacctaactaaatccttcattcgctccgtcgtcctggattccggagctccaagttggaataaggggaccgttcgaaggtttgagcccgtgacatcttaataaacgggcaaattttacgtgtagatcccccttgatttatcgagtaaacttgttgaatacctggatttatatactctctgacgtcgtgtctgcctgtgtatattttttttaccgcaaaagaaagtttgagggaaaatgcccatattatcatgagccagagactggctcaagctaatagtaagcttgcttgcaactactttatatttgggcgttcccgtggtcgcactgatcgaagcggtttctcaatcgcgataattgttgtcgtggccttgcggaagagcacgataacagtgaagtgattctaaccgcgatccattctgtgaaagccgcactgcctgcgaatgtgcagccgcggttcaaaccagcgcgctggttcgcaaaaacggcatgcttggtttggagttacaaaatgaaacgtgttcaaaccatgaaaccgattcaaacctggtttgccggtaattttggtttggtttaaactggccgaggtttggtttggtttgttctgggtgtgagtttactgggtgcggtcttgcttaactggttagaggaattgagcagcaacgaatgtagtctgggtcgtacaacctctgattataaaatattggcaatattggcaacattatcacggggggggggggggttatcaattagccacgcagaagacaccgacgcttccgtaccgttgtgctattcgactcggcaacatcacgctcgcgagacgcaagcaacaactcatcctccctgttcccacctgtctgtcgtggggaaacaagttgtttcaaacaacgtaccttcccccatccgtggacccggcacaagctacggtgtgaagcgagaagcgtttgacgtttcttgcggcttagaattcaggctctcacgtttcatcagcgaactgggccctgctggtatcccagaacatccttagaacacactcaaacgtgaaatgcggtacgatcgacataatatacagacaaacagcttttctagagtgacggtttttgtaaattggatcgtggtggtggacaggtcttctgttgatcgtcctcgagagcgtcgatgagatgagagtagtccgagtcaagggactgctggcaagagattgagttgacccgcgcttctcgatcgctttagttcgaactcattctcaaacttcccacgatggcgccaactcgtcttccacatctaattgcggccgccttggcggctacatcgaccgccgccaaggttgccggccaccatggccacacgcacgccccagccactgtagcccccgccatcgagacgcaggcctcgagtagcgattcgccgaaccagtggacgcagacctccaacgacgtccccacggtggcccccaccgccccctccagtgcgagtggatctcagggctggtcgcagcccacgacgacgtccccggcatccagcgaaactggcggaaatgcgaaccagggctcatcgcaagtgacgcaaacctcgtcgccctcttcttcttcgtcggacactgcgtcgtcttccaatacggcccagtcggctacgcagggttcgaatgcgacccaaacgcagacgtccatcaacagcaccagcagcggcgaccacgccacgttcggcaccgttacctcaaaggctggcgagtgtgttgtcggcaacccgaacaagtacgtaagtgctgccgacgtcgactggatctgggccaaccacatcggaccgaacgcccctactcgtgacgccaactggaacttcatggacaacaagaactggatcatggaccacatcgtcaagaacaagggcacgctcaactactgcgtgcgctgggacagcacggagaagctgtctaagaccacagcgtccagatgctggagcgtcagtacgcggcgtggaaccactggctcatcggctacgactgctggccgtacaacgagatcaagatcaacgtcgtcggttgggctgtcaaggacgcgtctctgctagactggacggacgactcgatgggtaccattaccgtgggcgaccttgactcggacgtgtgccccagtgcgatcagaagtgctaccgcttctacgacaacggggcgggctcgtggtccgacaccagcgggtgcaagggtgagccgtttgatatctcgctctggcccaagcagggactcgaaggtgggttcggttgtgactggggtcaggaggtgaacctcgagaacatgctgtcaacgctcgaccaggacgagctcgtcattgtcgctcacgaaatcggccacggcttcggtctccccgatttctacgaagacgccgacaagcccaacgctcagtggccgaactgtatcatgatggctggtagctccatgactctattcaagatatgctagagaactgaaacattgaaaatctggataaaaagacgaatagattacggataaattaccggtggatattctaatagggggtttgaatgtagctattagccaggttgtgaacgtagggaataagtgatgaacactctccaaacgtggtccacacactctacccctagtagtgggcggccactaattgagctcctactgtcttcaccgtcacgatcagcatacgtcggcactgaatggctcccccttcgcggagacgcgctaagccttggtggcggcgtgtccgttgcttccgtcccccgcatcggttttgtagtcttggttcagctaggtattcaggtcactactcctttccccggcgactgctatcgtggccgaccaaccacacagtctcagccagcacgcccttgttcttcagtcttgtgttgttcctgcgccttatgctgatccccttgagcaccttcccttgacgattgacttccgcagcgtccccccccctcgcggacgctcgcgcctcgccgccgaatcagcttcctgggcggtgccgtagtcaccagcccacgggaagtcggtggctgagcactgagcgcgctgggctcgtccgctcccgccgccgcgagtcgtacccgcgtcgagatctcagcccagagacacttgcctcacatccttgtccgtgaaagactgagggcgccgcggcggagccgcactagcgcccccgagaacgacgccgctgcgccgctccccaggagggcgtcacttgggcgaatgatcagacgaattttatggcggatttttcttctgtttttttttcctccaggaacattgaaacggccaaaagattagccgttcgctggcacccatttgtacagcgtccagcctgctgaggtattctgcttccgcgcccaacacccgaagcccgtgccggacgcccagaccgattcgcccgtgccggacgccgagagcgagacgcccgtgaccaacaccaagagcgactcggctgtgcccgcagccagacgctcgtgccaagagcgactcgcccgtgcccgcagccgccacgaccaactcgtctgtgcccgacgccgagagcgagacgcacaaacactaactgtaaaactaacactagcgtttgcaaactgttcgttagtgtgtagtgaatttgcattacatgtttgtggagttgaacaattttcaacgacttctctggcccacataagaaacaacactttgttccaatactcaagtccaatgcgacccttcgttgttccactggaatatattttgagagtgagaatttagcccgattgagcaaaccttcccctatctcatttgctggcctttccgatttgcacttttccgtcgtacggtatgtatactgtgtactcatgtataccaaattttcgtggctgcaagtgggccacaatcttttctctccctttcagcgcgacgcgtggcgaaccatggagcttcggctgtgcccggcgtagatgcgccccctccccccggacctgggcgcacgcaggatcggcgcgggcgacgttgatgcatctgacgcctcccaggacgaagggagatggtcgtcatgcgctccaagtacttcagcgacaacgtaagtgtttgagcaaacccacttcgagtactccccctttgctcccctcccctccttactcatatttgtcctggtgatgctagtgaagcgaggtagacggcgtgggccgagcgctgcgtaagtgctaacggacctgttgctgagcgcttgccacatagcgctgtagtcgggcaggtagattatttttcgggccggatacgggtagggcatggatttggggtctgacagttgtgtgctcgcctacgcgaggggtccgctgtttgggtctgagtatcctaaaactgattgtgcagtaattcgatccacgattgaggctcgcgctgcaataccggctgccaggtctcctgctggaagcaaggcctatcctgctgcctggcggtgtagactatcctctcgccctacagcttgaccttgtaatagtcactgacggcaatgtgcttcgcggcaccatagaaatccaggaaaaccagatgctcgatctccagcacgtacagcgcgaagccgtggttcttcggccagtgcttcatctgcggatgcctgcaccgaacatacaatcccaagcggtcatgagttgaagataccaaacaacgtaaagcacatgctcgtactttgagaataccacgcgttccgcatagctacgctgactctgctcgactggcaccactctccctgtcaaggagagccgccagcacgttgggtcttccgggtccatgaggcaggctttggctcctccctgagctttggagagcgccatcgtcgcgttggcgttcgccttcaaatccaccgcttcacacagttcctgtcagtttaatgccatagacatgaactgtaatgactgtagtataactctgtgggcacctgtgagatcctcagccgagaggtagaagaacatggtgcccgtggcgtcttccttggcgaaaccaaccccatctagataaatttccacgtcagaacacctccatgcaggggggatacgttggtgacagcgccctcaccgctgtacgacacgacgttggcgaacgctgagccctggaaggtgacagaagttgtagccatgatgccccacacgttctcgtgcaccagcatgcgagcgtgtttggcgtggaacatggcgatcgggccgttgtcctctgcatccggggccaaggaggtcgtcgacgcactgtagacctcgctcccctgagctggagtcgaagcgagcagcagcgagagcagcagaagcagcgcgacggtggttgcagccatgatgaagcggttgctctcgttgggaagttctgaaatgggttgtcaaaatatgaggagcgtggccctgattgggtggaggcatccgcctgtagtgtcaacttcaacatcgagtcatcttttttaatcttggctacactactggggcgtctaaaaggtagccatttaggccttggcgacgctaatggtctgctggagcgtgtacgtctggccggcgggcagaacctgcttctccgagacgcggccgggctcgacggcgagcatgttgatgtactcttcggcgccaaagtccttgaactgcttggagcgctcgacccacgggttccagatcacggcgtcggtctgggtccgggtggccttgctgcccgtggtgatggagccggccttcttgatcgtcaccttgcggtcagccgaggagaccacgaggggcgacggcgcgttgtagtagatgctgtcggtctcggcggagatgctgagctcgggctccgactgggtcttgttgacctgagccaccttgtcaaagaacttgagacccgacagacccgacaccttcgtgttgccgttgcgcacgtcgtccacgtagatgtagttgtgcagcagcgcatggaagtcgatgggctgcgtgaacgtgttgcgcacgcgcagagccgtctccagctggttggcgtacagcttgacctcgtactcgagcttgaagtcgacgggccacatcttgcgggtcgcgtcgctggccgccatggtgaacttggccacactggggctgttcgcgtcagtggcgtccgagtggctcgccagcgtccagttggtgacacgggcgaagccgtggccgggcagacccttggcgctgccgaagttggggaacacgagagggataccgcccataatggggttcacgccgtccaagtacgagtggttggacagaaagatgacatcgcgggaggggtcctcggccgcgcggaacgacttcacgtgagctccgaagaggaaaacctcggcgttagagcccgacgggtgcgacagcttcgtggttgggagctccgcttgcacgctggacgccagcaggcaagcgacgatggccgcgaaagacttgaaggccaacatgaaggttggaacgctggtgttcgttctgttgaagggggaattgctcagtgagcagggcgggcttgccaccggccgtggcccacggcgtgagtcaaatcacacgaaggttgccacgtgctcgttagtactaatctgtattaacctgtacaaacgcacaccaggtaggccccatggcgctttccaaagcttggattggccaaccaccgccgcaatatgctcgaccgtgatctcgctgctcgccaaactcgtgggcaggagaactttcaccatcatgagaaccattatcgttgcttcgttcatcccatacgtctccgccgcgcattgaactcgagcgcaacgcgattccgaccgtcgacacctcaacgatttacgcattcctacaggttgcactggtactctgcacgaaagcattagcctgcttggtctcgagctggcacaatacattcttgtatcgccgatcactttcgtacatgtattggcaatttgccaatggcaagatagttgtcgccaacgcacgactccctccactccctcttccggtacagagacaacatgttaccgttatacatacttagtttgctattaggtgaaaattttgtcaactttgacgcatagtcacttcttcttctggctgagttcttgcgatataatatctctagtgtgcgcagcgcgcgtgtccatcgattccatcttggtactagctcaaaactacagctgaaaacgcaaggcaacgctgcagtcttcgtgctgccgcacgtgctacagtggcacttccctaaataaacccctctaactgactatgtgttccctatctggttaggattcctcgactgcaaacgggattatatgaatttcactataggtgttctataactgatcaaaaacctctttatttcgccattattggcgcctcaaccctctaaatggacgccgtagtaatagatccaaactcatatatatttttctcaatcacttgcctgcctcctcccacgtatgccattgctaccactactcccgccacaacaaatcgagcgaatagagaaattttatttgggatgctaagttggaacaaagagtttgcagtaactaaatactgataaataagctagccacagtattttacaatcagcgcagcgtacatatatattttacgaaaaactaaaatattatgatgtcgagacaactaggggctatgcagtagataccaagcaaaagataaaactgcaggcatggtggcaggatatcgggacaacaaatattcccataacctcactgtattgaaactcacatacaacctgaggggatgcgattctgctaataccaatgagaaggagtaggaacagacaataccgcgcctaccgttagttctgtctgtgtgaagacgaaacaaaacaagagtacaaaaatgctggaggggtaccaggtaaagaaagcccttgtactgtgcaccgaacatatgaaaatgtagccattagaggtgtagccatttctttatctgatcaattctttaactgaaacagcgtattagaccgagcgaactaggtgtcatttataaaggtgtcactgtagctctgtaaaaccgggtcaccccgggaaaatataatatcgtaatctcttttggttttggagtcgccgtaaaaaataatcatcacaataaaggactaccataattcattattttggcatttattgaaataactatatacgaattcagtatactattatattaataatggaagtgctccattacttctaagtacagattctaaatgagtaagctgaagcaataataattatttcaatcgaaaatgtatttattagtagatattagtttcctacgtattactgaagtagtactagctaaaaatagtacaagttagaaatattaatacgtgattgtaaacaatacagtaatctgcccgagtaaggaacgcctgatatatataaagacgcagaatatataaattgatgttaagttgagtatactttccaatgtactgatttagctatatcaaaatgagctgaagagcagctttacctacgcgtccagaatgattccaacagtggcgtatggtcgaagcactaacctttgaccaggcatcctcgcaccacaacagcgctgtcaaccggtcgacctcgtagggattatctagcccttcaccaagccggtctagagcctgcatcatcttgcgggatagaatgtgtcgcttaatacaatgaatgattccttggtccttctccagcggccgccccagcaggactgcacttgacttgattatgcggcatatcgttgtcttgcctggggcggccgggaggctgaactccgtcacagcccactcagccaggcccctgtaggagagagcaggtgtgcgggctgccttgtcgaggatgcccactttctcagaccaagtgaggcggagacgcttggacggtgtggacttcatgggtggagtgggggaggaggtgggcttgtggggcgaggtgcaaaagaaaaagtgcgagtctaccactacggtacatgtagtttgaggtctagtaagatcgctaaatgcgcgccatttttcaaacgagggtggagagctgatgattggcactggatttttcacctcagtaccttgcagtaccttgcacatccccctatcgccacatcgactgaaaaataatattaaatatgtgaggctattagttatacacccgttccttattcggacagaattctgtattcattatctaaagaatcaatcagaaagacgcgctgtccgtccgtcacaaaatcgtcacgcttgttcactaagtacggatcctactaagtacgagtagctacctagtgcagcgaaggcgacccccttatacgatattgcggggccgcaggacccgccccagcctctgtagtactaacctgacattgagagtagtgcagcgagccgacgaggcgagcggaacggggtcgataagatcacccccgctttgatcaatactatgtgttgcacctgctaccatatgaatcgggtaaccgcgcagcgatagctacggtatgtagtgtgtgtgaaaaaatagtatgagctcggaaatagtcttgatgagaccacttccgaacaaaacaccaggcatactgaaactcatataaatgtttctcacgtaatttagtctctatgtgaaacatcctaaccaaaaatagtatgagtgagaccaataccgtttccagtgtacatgcagcttggcctgccccactacttactatattaataatggagggaggttgtttcaatataaacacattgtaagccatatcaacgcacagatagttatagcaacacgtagtcagtgatagtgaagcacatagtaagcgtcatgcacgtacagttagcgataacagcacgtagaaagcgataggagcccgtagtaaatgatagcagcgcgagtacatattgcgcaaggtaagctgaaggtggatacagtattaacagcgtgcccagcttatttttactataataaaactgccggattacaactaccgcgtagcggcagcgcttggctctcaatgtgataaacatccttcgaagtatctgcaacttgctaaaaggcatcgatagtttatgttacgtgtcggtagtataatgagatctgaatagtagatgctgaaagtcaattagctggagctctatgatagattaccttggacgcgcactcccgcactaaccatcccatttaatgggttgtatatacctgtatggcggaacttgcatagtgcaacgtgtacttcatagatacaaagtgcgaagttgttacgttcaatgtcttagcgactgtggtgcacgtgatgcagtaaagtgccgcttaataaacggatagggacgattcataaaataaaatacgcactttaccggtatggaccattgaaaattccgaagtgatgttacccgctatgtatatgtacacggtgcttttataagaacggaagcactaagtatatgctaaggagaggcatagcgaagcgtgaacggttatttaggcttatacaggctatacgcttggaaccaactaacagaaaccatggcagagtgatacacttggtataataacacgtatagagacttacgtgagcacactaaacacgggttgttttagatatgtactttgcagatacgttgaaggttgggttgaataaccgctacgatgtggacagggtttacaacaggaccgacacgatagagaatgctttatattgcaacgtgcatctacttacagtaactctgacgtgaagctgataccatactaagagacccccaacatacaaacacctttttacatgcatacaatctaaactaacgacatttgactgggcagcccttactactacaactaaccacataactaccgcccgcgaagcgggtggcgctcggctagtcttaagaatcaatcagagcgtcgttgtccgtcggtcggtatcaaaatcatcacgcttattcattaagtacgaatccctctaaatacgatttgctgccgagcgagctgccgagcgaacacccgcgtgcgttctagcgggccgcccggcccgccctactacataattactaataacactgcaagtagtgcagccgacgaggcgagcggaacgggggcgaccatattacccccgctgtgccgctaaggccacatactattattaccaaccttcacgatattaatgagcagtagcagcgatagcggggctcacccaatgatataatacctacttacagtgcgagtatgtagtacgttatggaagggataaactgggtcagccctactacttagtaaaatagcactgtagcgaggttggtataatataaacacatagtaagggatgatagcgcatagcaagcgatgacagcgcgtactaagcgatagccgggcgagtacatgcagtacaagggagtctgaaggggggtgatcgatatttccatcatgctcagcctcgctgtactatacttctgtagacaccttatagctgctgcggtacttggctattttgttaactcctactattaattaaaataggcccaccgcggagtagcaacgatagcttcgcttgccgtacgacttataataaatacactgaagcgaaattggtttaacataaatacatactacgatatagatatggctcgccgcgtagttagcgatatcaacatgtagtaagcggggactgcttgtaataagcaaaggagtgcgtagtaatatatagcagtgcgagtgcatgtagcggacgaaattgttactgacacgcatagcatacttttactgtaatacttgagggatggatatattatagctacagcggcttcatcttggggcgattttttgttgctcttgcttgagcgtgtttcgtatagttttcaggtacagtatgtagcggtaggattatgccttagtggggtattatgacattcactgagcgggaactttttatcatagtttacgctgagattccctctctaaccatgttattgtgggaaactgtattagcataacgcaaaagtgaattcatagttacgcggtgcaaggttcttactttcaatgtcttagctactataaatgcagacagacgctaagatgctaatgtttgctgcgtagtagaataataaactgatagccacattaaaaaaatgagtgttgaagcaggttacgtagaagtttgtgcaccccgcagctccaaagacattacgggccaaacgaaaggctgaagcgacgttgtatcggtattttaataaaacatacttagtagattgcaaactaaataacagagagctatggttgcatgacaaactcaagaaaagcacgtacatagacttcatttggcacgccgtgcaagtgagaatgttttaccctgcaacatgcatctacccatagtcactccgacgtgggaatagttttttaagctgatagcagccacgtaacgttactaagagtacttccgtcaccaaaaaaacctcttacatgcacacaatcgaaatggataacatttgaactggataaaagcccaccggagcgaagcggaggtgggcggccctatctactgcaactaaccacataactaccgccgcgtagcggcggcgctcggctagtcctaagaatcaatcagagtgtcgctatccgtccgagagtagatcacgcttattcgctaagtacgattcccactaagttcgatttgctgccgagcgtagcgaaggcggcccccagtaatggcacaaacaacttttgctgccgaccgtagcgaaggcagaccatctagcgggaccgcagggcctgccaaatattattaactaataacactgcgagtagtgcagcgagccgacgaggcgagcggaacgggggcgataaaatcacccccgttcggatcaccgcgttaaaccatagcgataggtagctgggcctgccctactacttagtataatggtaaggtagctaggttggttcatataaacacattgtaagccatagcagcgcatagttagttatagcagcacggagtcagcggcaggcacgtatagttagccatagcagcacgtagtcagcgataggagcgcatagttaagcgctagcagcacgtagtgagcggcatgcacgaatagttagcgatagcagcacgcagaaagtgataggagcgcgtagtaagtgatagcagcaacgttgtaagtggtagcagtgcgagtacatgtagcgcaaggtggttaggtattaacaaggagccgagcttattttactataataaaactacagggacaaattaactacaactaccgcgtacttggctctcaacgtgataaacatccttcgaagtacatatctgctattgctagaaggggttcatgtgtgtgtgaataaggtgtatttaggttacttacactacgctggtatttattcttcctaccgcgccatgctgaacctgaactcccttccgttctctgtatagcattggagatcggatacaggctaaaggctaaaagtggttcatgcatcgatagattatgttatgtgtcggtatgtagtataatgagatctgaatagtagacgctgacattcaatgagctggagttctatgatagataaccttggacgcgctctacctgtatgctaaacgctggaaacggaactttcatagtgcaacgtgtacttcatagatacgaaatgcaaagttgttactttcaatgtcgtagcggctgtggtgcaggtggtgcgctaatgtgcttatgtactccgcttagactaatacttaaataaaaataagttttgatgaggccgcattatcgcagcccgaagttgaatacatttatggatcatataaatgccgaaacgatcccgatatgtatatgtacacgatgttttaataagaacgaagcactaacgatatgctaaggagaggcattgcgaagcgtgaattgttatttaggcttatagccttgatacagaatgtaaggctatactcttggaccaactaacagaaaccatggcagagtgatacacttggtaaaataacacgtatacatacttatgagagcacactaaacacgagctgttctaaatgcagatactttgtagtttgggttgaatacctgcgacgatttggacatggtttacaacacagtaccgtgcgatagagaatgctttatattgcaagtgcatctacttatggtaacactgacgtgatgaagatgataccagccacttttaaccatactaagagtactcccaacatacaaacaccttcttacgtgcatacaatccaaattaatgacatttgactggaaaacagcccaccggagcgaagtggaggtgggcgggcctcactactacgactaacctaaacttaccgccgcgtagcggctaggcctaagtatcaatcagaaagacgcgctgtccgtgtgtagatcacgtgaattcctattggctgaaattgctgccgagcgcagcgaaggcggcacactgtaccttttgctgctgagcgcagcgaaggcggtcccgtcgccgaaggcgaccccctcatacgatattgcggggccctctgacgaatggcttgatggatcgtgcctaattgacgttcgagaattgaaagggccagcgactgggccgctccgtcaatggattcgaaaccagaacggcattttttgcgctgaatggctaccgtggatggagattcggagccttgtgttatttgacggttctggagcgctgacagaaccttcgatttgtcactccagcctagcggatcgtgaaactcgtgttggagatattgttcggtggtatcacgtcgaggaaacacacatggcatttcaaatagcaaagactgggtttggtgtctccagtccttcgcaagcttacagaatgcacgttgcgcagttaattggattcctacttctcaacatgcctgagctgactcatggatcgatgaatcttaactaggtgcgactactgacaaaacataccgaccacccttattcacttgaagtgctgcttccggatccaactatggccaaactgaccattatcggtagccctgaggcacgctacttcccagtctctgggggtcacaaagctcagcagctcctgggtgtacttcaagaatcgctaggatccgcaacagaggtcactaggtttcatctccaccctcaattagaccgcctcgcctgtttgtgggcggggaagcagcgatggagctgcacacggaaatcaatcaagctacgagcgatggatcgcagcaccaacgacgtcacggttgctttggaacagcggatgagcgccaggaaagatgaggacccggtggtccatgcagcactaaagtcgatttcttggaagcaaattcgacgttggccaggtttggatgtatgggtagagcggctcgtgtatcgtctcaaaactcgcagtgttaaatgttacgaccgactacagcggagactggggtgcccgcatgactcgtgcgttgggaatccgtataccaccctcacacacattttttggtagtgcacttctgcggcgacgttatgggcgggtttcatagcgagatggactcagctcggattagaggcaactttacgcaaccaagcaagctgtttcactttccaccttgctactctccctggagggtttattgatcgttcgaaggaggaattcttttggttatcttccgagtccaaggaggctactaatctgcaactacatggagcggcaacggactgctggaggcttggagttgttacagtcctcaaagtaatttggaaatggaggaatgatcactatgctgctgttacttcgctggcgacctcgaaatacaaggccattctcagggctcggctcaaggactcgtattgcactgttgaaaacgcatatcgcgcagctggccgatcacgggctcacatgcgggcgatacatactgtcgttggagcactcaacggacattggaaacatactttgttccacatagagggtgggtcggcacagtttgtgttattttttgacggtggatctcgtgggaatcccggaccagggggcagtggagcagtcatcctgaaggtcgacagcgattctaacacgggtaaagctgtctgggcggctagcatgtcgtacgcggcaccaactactacaaataaccaagcggagtaccggggactactccaaggactccttcatgctcagcgaactccgacattgagaccactacacgtcgtgggagacaagcagcttattttacgacaacagctacaccggacggcaccaaaagctgcccatttgcgcactttgtatcaaagatgcagagtgagtgccgacaaatgtggtgttcgatcatggtctcatcacctacgagccttcaacaaaacggctgatgctttagccaatctggcaatggacacaacctgcagcaggcagctagcctttgacatcgaggcgggcccgaatggagtctggacagctgctctggatttctttcctggagacctacaacattggacggcaggagcggcaaatgctgacttcacaccaacttcagctgcatcgtccaccctataacggactgtaccctagaagggtaaatgagcggatgcaggaactttgtattagaagtcgttaggttctaagtgactacattacaaaaaaaagatattgcgggaccgcagggaccgcccaacctctgtagtagtaacctgacattgagagtagtgcagcgagccgacgaggcgagcggaacgggtccgccactgccgtagcgaagcgtaggcagcctgctccaatagcggggcgagcatagcgagcgaagcgccaactaactaaaaatccccgcggcgtagcggcggcgctcggttagttgccatcaaagacaaactggcgcatgctctctcgtttcagattcgacatctcggttgaatacagggatgagtattgtaaaggaatccttcattcacgagtatatgttgcttgcaacccgtgcgcggcggccgcggggcgggcggcggtagcacacccgctggttaccgcaagcaacgtggccggcaggctacctcgccggcggcaaggctaggcccccgtaaggggaacgatttgattggatgaaaagatatatcctgagatagtgaagctgaaaaccgagttgagcaataacactattgtggttttcaaatatgaggacccttctcactgcaaaatgcatgatgacaaaccgaaccttgtcatcttgaacgtgtcttcgaagagagagagcaactctcttcgtgctttggttgattcgggcgcgtcgaacaactttgttcgactgcgaagtctatcaaggcttgacttcgaggatttaaagatacctcgaagtatgctggaggtacgactggcaacgggtgccgtcgtgaagaccgagaagcgcatggtacgcgtgcgcttcacgtatgaagatcacgattttgtcgagacctttatcgtcccggatctggacgataagtttgacattgtattgggcatgccgtggcttgcacggcatgatccggtcatcgattgggagaagcgcactctcgtgcgcttcggtcgcgacagcggaacagtgagcgatggccctgttgccgctacgcacgcaccgacaagtgcgcgcgactccccactcgagacagcgccttatcccactgtcccggagcgccctggacgcgcgcgagcacacgcgcaagaacagctagcgtcggcgttgccgccgacagctaatgaaggaaatttgttgacctcggaggccgacacccgcttttcagcgaatcaggaagagtctccgacctcaaggggcacggatgacgcaggcgagtcacacgcttcagccgtggaggctgacgcgaatctgattggatcaggtctggccaataatatgagccaaggtgacgtaacgccgtcgactccgggagtcgatggcttgggtgaatctgattcgtctgctcggggagccgacgcaccctacgtaatgggggtctccgccaatggttggcgtcgaggtactaaagtcgcgacgggtccgggaaccggcgctgcgaaaaagaatttcgcgtcgactccgggagtcgacgcaccctttgtaacgaagggctccgccaataacaggcgtcgaggtgaagatgacgtgtcggctccgggagccgacgctgcaggcggtgcggacggttgcaaacgtcccgcaccggaaaaacttgcatgctgtcgtgcagccgggctgcacgacgaagcgccgggcgaccaagccgggcttgaagtcgctcgcccgcgggatgaacccgccggcggtactgaagaagaacacccgtccacggctgggcctggacgaggtcaagaaccaagcggagccgggctccgcaaaacaagaagacggcgcatgggaagatcgctgcgcaagtctcggcctggggccgagacgctacaagaaatgtctgccgggcagactgaggctgagaagccggacgtcgagacgttgaacgtcttgacgcgtacctgtgccggattccggtacagggagatgaccctcgataatcctccgacgcaagcgtcggagttgacttcgcttccagtcatgagctggaagcgcttcgcgcgtgacttgcatgatggacgcatcgagcaaatatgcattctctcggacgccgagagaacgaagagcgagaatgaagaactgaggcagttcttcatggagaacaccactgagagcgaatacactctccgtgcgaagacgaagaaggagcgctttgaagagcagagctgggactcgttgaagacgagtccctactacgagatcttacgggagtacgcggacgtacttccggaagagatccctgcggagcttccgcaggataagggcatccagcacgagattgatctcgtgccgggggacgaagtactgtgtcacgcggcagtggccactgccgcgagagcaggtcaaggcgatcgacgacttctttgagagtcgtcgtaaagctggacaagtgcgggaatcgaagtccccgcacagtgctccgacgttctgtgtcaagaagccatagggcggctggcgcatcgttcatgcatacaacaagctgaacgatgcgacgataccggcgcagacaccgataccgcgaaaagatgtcatcatcgattcgatggccaggagcactatctacagtgctcatgatctgcacgatgggttctatcagatcctcatgcgtgagagcgatatccctctcgcggctgtgagcacgccgagcggcatgctctgggagtggctagtgatgccgcagggtctaaagaacgcccctgcgaccttcaacaggtgcgtgacgcacatgttgcactcggtgcgcgacttcgcaccgagatacttcgacgatgtgttcgtccacagccgggctgcggacgggatgagcgatgttgagatgcacaaggtgcatctccggaagctgcttgcgcttatgcgcaagcacaagctctatgcgaacctgaagaagtgcatcttcggggcgagcgagatacccgtactcgggtgtctcgttgggaagaacggtgtccgctctgaccctgagaaggtcagagtgatcaacgagtggccgacgccgtcgttcgtcaaggaattgcggcagatccttggcttggccacgtacttgttcaagtacgtgaaggactacgcgggcatgatacgcccgctgtcacagctcctaaagaaggacgccgagtgggtttgggctgctgagggtcagcaggccttcgatgcagtcaagcggggcttgactgaggcgccgatcttggcggtggccgtccgagatcgcccattccacgttgtgtgtgacgcatccgacttcgcaatcggatgtgcgttgatgcagcacgatcacgagggccgtgatgaagtacgcagtcgcgaagttccgagtgtatctactcggaagcaaaccgttcgtggtctatacggaccacgcgtcgctgcggacagctgtgaagtcgccgcacatctcgcaacggatggcgagatggcactcattcttcgccgagtacaacttccgggttgagtacaaacccggaagactcaatgtggtggccgacgcgctctcgcgtcgacctgactacgccacgactgacgccaacgtcaatgccattaacgccatgcgatcgagcaccccgacgtcgtcactgttggacgacgtgaaggtcgcgtgcgcgcacgacgcggatgcggagctcttgctggcctacggctcagcgccttctgacaaagctcgtcagaagctgccgaagcatcttcgtgctcgtgcacaccgttatcgggtgcacgacgggttgttactctacagagcagtcgacgacaacgcggaccgcgtagtcgtgcccaatgaccatgaccagcgactcaggatcatgtatgagtatcacgatgcaccgactgcggggcatccgggccgtgagaagacataccttcttctcacgcgagacttctactgggcccaccagtacaaatgggtgcgcaagtacgtccgtgcttgcgaggtttgtcaacgtgtgaagcctgcgcctttcgcgcaggctcccttgcagtcactgccgactccgtcggagtgttggcagtccatgtctttggacttcgtgttcggtcttcccccggacagccaggggaacacgggcgttgtggtctttgttgaccgcttcagcaagatggtacatcttgctgcggtacccgctgaagtgactgcgaagcagacggcacgtctgttcgttgatatggtgttcaaacaccatggcatgccgatcgacattgtgtcggatcgagacccgcgcttcactgcacacctttggcaagaagtgttacaattcttgggagtcaactttcgatgtcgactgcggaccatccgcagacggacgggcagaccgagcgcgtgaaccgcgtgctcgtagacgtgcttaagagctacgctcactcgttccaacactggagcgagtgcctgccgatggcggagttcgccatcaacaactcggtacatgcctcgaccgggcatacaccattctacgtgaatgccatcaggcacccacgcctcccgagtctcctcgggatggttgctccttccgtaagtgggggaggatctccgactgcaacgcagcagccgcagaatgccgctgacacttgcacagtgtcagtcgcaacgacacgaagtaaagccaagaaccgcgcgtctgtgccctgcacagacgccgacaagcgcacgaagaacgtgtctgtgcggggcacagacaccaacaagaagaagaagaagaagaagaagaagaagaagagcgtgtctgtgcggggcacatacactgacaagaacaagaataagaagagcgtgtctgtgcagggcacagataccacgaagaccaacgcagaggcagggcctactgctggaagcgagccgaacgagctcagctcggacgcaattcacttcgtacagcgcagacaaaccgtcattcggtttgtccaggacgctatcgcagcttctgttgaccgacagcagctgaacgcagacaatgttggcaggggcaacacaatgaattcgagaagagttcattagtcttgttagctattcaaacctgcctaaacatgcagtttccgacttcggggtgagcaagctcgccccgcgcttcatcggaccgttcactgtgctggcacggcacggcaacgcctacacactggacataccgtctagtatgcgcctccatccgacgttctacgtcggacggctgaagccatacctgcagcacgagctacctagctcgactgaaccgaagcagaagactcggcggaagccgttatcctctccagcgcgaagtcgcgctggagcagcgggtcgggctaatggtccagctcggccggaacgatcgaggcggtctgggaggccgccgcaacctgagtatacttcagagcgccgaacccagcgctctagaactactccacgaccggaactcggtcgtggggagacgcgagatcagggtcaacaccaagttgaccacacacggggcgtgtttccaccaccaccgccgccaattcgtgacgcacacggctcaactcgatggataattgagcggattgttggtcacagtatcccgagaacgaacaggcaaccggttcgttttcgtatccgttggagaggattccctcccaaccacgatacatgggagccgcggaacgtcttgctcgaagacgtcccggacatggtgagggcatacgaagcccaccatgggctacatactggaacgtaatgcgagcgctgctgttaacagcagcgcccgaagacacttcgagggcagacataggttcctgcccccgcggcagcgacgcgcttcgcacgtagccgcgcatgctactcaacagcagagagattctccgctgctgcgccagcagtcttcaactacgacgcgctcgttctattacgagcgcgctctcttcaacgtcacgcattgaccaagcggtcaatggtggttgacgtgccgagaccggcacgtctaaccttgacggggggatggtgtaacggggttacacgcacaagtggctacagtcacttgtttctctaacagatgcgatgtctgttagaggtttgaacacttcctcgaccttggtgtaaggtacaccaatggctacatacatttacgaccaccacgacgggtggtccatgcacatttaggattcctattggctgaaagcagcatcttttagccaatgcgtgacttgcatattagcagaatcctgccaaccagccgttggcaaattcctagtttagaacattacatttagaggaagtcagaaacataaaacaaaaatagcagttctcatcttttaccaaaacccgctacttggagtctttatcttgtttaaattatactcgtggatctcgagtatacttaactcaagtaaaagaaacctacgcttcctcatacacgtgcgcatatgtgtaagccgtagtagtgagccaaggtaggcccactaagggggtccaagacttgccgttcccgacgacactgaaaggcgatcagagtttcatggggagtctgaattactacaacaagtttattgaagatctacctgtgatcgcggccgtcttgtacgagctgactgaggaacaggtgaaactcaggagagacctgtcgagagcccaggaagcctttgaaatcctgaagcgcaagattgtttcgactccgttactcagacatcctgatcgttcaaggtccttcgtgattattccccacgctaacccgtgggcagcatccgctgtgttgggccaggagtacgacgggattgtgcatccggttcgattcacaggtcgcgtcctgaatgacgctgagctgcggtatcacattgcagagaaggaggtgattgctatcctgagagtcctggaggtgtttcgcactctggttgaaggcagccctaagatcgttgtctacacgcggtactctgtgttgaagtggttgctgacttcgcagtcggcagacggtcgaacggtgaagtggggtctgaagttgtcccactggaacctagatatacgcagagttcaacgcgatgaagacggcttggctgcaattgtgggggcgggtattactcccagagaacacttggatgagatcgctgaaaacctgatcccagccaaggggtgcgtcaaacctccagtgcctatcagtatggaaattctggaagcggactacgaggggtgtattctgagtttcgatggcgccgctaagacttccacgtgacaaggaagctgcggctgcattatgtggcatgtccccgggtgggaaatcctggatgcccagggattcatcctggaggacgtaactgtgaatgacgctgagtatcatggacttctgaagggcctcactctggcgattgagcgtggaattcaggatatcgttgtggttggggactccaggattgccatccagcaagcccagggtctcatcaactgcaatcagccaaatctccagaggaagctggccgagtatgaagtgctgacgacgaagttcaagtctgtgcggctggtgcatgtcaagcgagagttcaaccaggcggcagactacctgacgtctaaaaccctcgcgcttggcaaatcctggaaggtggaggatgctgatgaacgaacacatctgcaattagtgtccaggattcacgagaagttggtaaagccgaaggtgttattgaacgttggaattcaggggagtgattctcagggtgtcgaaactctggatatccctggacctgagtgcgctccgttgcctgtggcggccagtgtttgcagtaatgactcgggcgcagactcaggagatcgaagctcaaagcgaacccatggggcctctggaataccaggcagaacgctggcgacgcatcaaagtgcaccaggacaaagatgatcacctgctgcaactcaaggatttcctgaagggcgacacgacgaagctgtcgcacgcttaagccaggaaactcgcgaaggtcgctgatgatttcgtgttggattccagagaagtcctgtaccgcttgagtcggtctaccagagatcgaccccgagacatggttgacgaactcagactcgtggtgccgaaagctctgcgaccggatatcctgcattacgcttacgaagattttcagggtgggcaccaggggatcacgaggacgtacgagaaactacgctctgagttctattggcacggcatgtacgctgacgttgaagtcttcgtcaaagagtgtgtggattgcgcaagcggcaaggggcgccctcagaacccagggccttcccctgggaacatcgaaccgaggcgtccttttgaagttgtgcccatggatttcgtgacgcatttgcctaagtcggatcgtgggaacacgttcttgttgcattttcaggatgcgttctcaggattcgtcatgtgtaaacccatgagttccaccacagctcaagatgtcgccgaagtgtacgaagagcaagtcttcaggagattcgtcgcgagctcgatgctgaggcacgaccaagacccaaggttcatgagcgaggtgttcacgcgcttccgtgaatttctgggtagcaagcagcgggccactctggcgtatcgcccccaggcgaacggacaacaggagcggtcggtgcagactgtcgtgcgcagcattcgagcgtacatcgctgaggcggaccagagcgactggaacgaccatgctgagcgcttgatgtttgccctgaatacatcgttcgatgccactcgcctggacactccgttttttctgatgcacggctgggacgcacacggcactgtgtctgcaatgttgggacccaggccctcgattatccaggagcgcactgcgtacgagtggcgcaggaagctgcagcgtgactacagttatgcacaagcttgcgctgatgatctccagaagaaggccaaccggcgcgctctgccgaacaaaccaggaagtggagagagctgtccgaacgactgaaggcatgattcgcagccggtgatcctgtgtggctgtatatacccaaagtgcagcccgggctgagccgcaaactggctcacatgtggcatggtcccttcagaattcaggaaatccatgacaacttccgcgtgaaactcagggttgagaacacaggatatcgcgtgaacccctgggtacacgtgagccgtttgaaacccagagcactattcccaaagcggcccactgtggagatcgacgtggacgaggatgatgagtttgatgcggcgctgttgcctgaagacagctgggagcccgacgctgcgaacgatgagtacgaagtcgagcgaatcctggatttgcgatggactaaacggactcggacatcgagacgaattcgcgagtaccttgtgaagtggaaggggtatgatgagaccgagtggctgcctgtgtcgaagctcaactgtggtgccctgctctacgaattcaatcaaggcgcaagagcgcgggcctgtttccaggccatgcaggctggagatgatcaccaggattctagcactctggggtgacaatgacccagagttacacgtgatattcaggggaaactctgggtgacactgtgaaactctggggaaaatcgacggaacgtgtgaatattggagacggaaaacgtgaatgtgatttgacttgatttgattatggagaaggtgatactgctgaggctttggcagtgtgtgagaaggaagatgaaggcgaacgacgtggacataggacatcgatcccagcgtcggcgccacatacttccttcaacccctgaagatcctcgtcggagagctcctcgaagccgaccaacgtggtcgcgccgccgtagccttccatggcgaacgcgcccgcgcgaatgtcgttcacgatccctgggacccccacgagatacgcgttggtcttgagattcggtggagccggcagtttccagtgcggggggcgttcagggaccaagaagtcagggggatcgacctcctcctgccgaagcatgcctgcgaagatgagtcccctgacgtcctctagcgtcgcgtgtcgtggtaacttgaactcaggggcgccctccatgtccacgtccggagccacgccgcctgcgtctggagccttggactctgagttcgcgtcaccagtttcttgggttgcagcgtcagtcgaggcgttgctatcggcctcgcgcatgtccgcgtcggaggtcttgccggtgtcgctggagaaggagatgcgcttggtcacgcccgtcttggtgctgcacgtcgaagtgtcgccggacgctgagttacccgcctggccgctgccgccgcctgctggtgcggtgctcgcaggggtgtcgccggtgcgctgctgtgtcggaggtggcgcgctgccggggggcaccgtgccttcagctggcgccgtcgcttacttgccgtccgaagtcgccctctccgccatgttgacgatctgcgaaatggcgatgtgaccgcgcattgcccgttggaggttttgcgtttgagaggagaaccttgaagataggtcctgaccaaccgttggggagacagggtgccgccaaagtgagtgaaaccctgggagtcgacagagtgcaacggccgtatcgaagtcgacggtggatagacctgtgtatttttgtggcctggccatggttcaccagttcggagcgatttcctctttgatggacccggaccaggaggggcggttgacacgaggcggtccccagaaaattgccgacaatgtgccgtcacctctgtgacctggattttgtatcggatgctgattggtggatgacttggatacggcgcggctgtacctgcgtgacatggatggcgactgtgggagagaagtgatttctcgggatgaatccagcgtctgaccgcagatgggcccaactagctggaagtgtgaatcctgggagtgcacgcccagaatttcagagaacactcagtccagccgcggactttcccttacgatgagtgcctaaagtctggcggaaagtgtctctggagaatgtatcccagagtacgcctcatcttgctgtggttcagagtgccccagaggatcaaattaccctgagaatcaacccactactaccatgatcatgcgcaggaggccgctaaacccactaaaagtgtggctttgaggagatacacatgagtctgcactgcagcagacttgttacccagagtgccgcacggaaaacctagagtgccgcacgatgacccagagttcacctccctgagtgcagttgacccagagttccaaagatgattctctgggtttggaccataaatccagactctatactgaacttaagtgtttcccgagccaacacccaagaatccccacagttccccaagattcctcagaattcccaggatttcagaagatgaccctgagtgtcacctggttttcagggattcgagtcagttcgaaaccagtctgcaatcaaaatgatgcgtgaccttgaacaaccgtcatggatgcacagactggatactttcgaggagtcgagagggagtcctgcaccatactaaaccaagtctaaggacccacaattggcacttttgacgccgtgcgacgatggattcgcaagccgatcgcaagattggaccgctgaacccaaggtatactcaagacaagacattttgaccccaagcatagtgaacagaagatatatgcccgaagaagagagagagagagagagagagagagagagagagagagagagagagagagagagagaagtagctgataaaaaccgaacagagttccttttaccctgtactgcgcaagtgacttcggccaagcctgccgacggaaatccggaggacccgagactacgaccgcgggacgctaagggcacatcaacggcgaaagacagccgtctgtgtgggctccatcaaactcaagtccagttaggtggtgaccagcgacggccttgagcttcctggggtgatccatctattccatatcctagttgggtcacttgctgtgctcgtggtagcccatttcatattattccagagggtattctggggtgctaggtagtcgcctccagggttttgtattgactgcttgtgtgaagggaaggtaactgatagtgattgtattttcttcctttattggaggtggtgcgcgtttgtgtgagtctcaggggagctaggccctgaatttcagactcgagtgagcctagtgtgtgtgtgacccaccgtccaagggtccaaaagaataagtgacggctagttgtagcgtttgtatactctgtatttgttggttttatcgagctaggagggcatttgggtaaggtgtcttctgagttccaagtcccggagttgactgaaatcctggaccctgaattcgtgatatactgggtttcgggagatctgattctctgggtttgcctttggtgtggaggtgcgttctgaagtagacgtgcactcccgcacttcttcgaagctacatttactaccggtggagtgccgttccgtcgaagacaaacgagccgacagggattacacaaggtacccacgccaaccaaggagtgtgattctcagggtttaaagctttgaggctgcgaatctctgggtctatcttcttgctgttgactctcaagtcgattctctgggtctacccctggggaacagtcttgggctgcgccatacgaacccccccccctgggcgacaaaggtttcatcggcctcgcctcacgtgcccattatcggagactttgccgtcgtcatcgtgtctgttctcggtcgtctcgcgcgcgtcgtggtcttaccgccactcgcactagccccgtctgcggtcgtcatcaccgtcaactcacgtggctcgctgttcgccgtgacgctcgcctgcgccgcgtcgtttgccgacaccacgttcatggccgcctcgtcggctgactcactgcgtccctccgatctagctactgcgtcgtcaccgtcgagtcgcccgtcatcccggccgtcgtcgtgtttcagcggtaccgcgaaggtcacgcgcttccctccgtgtttgccggttctgtgtagcctcgccgtcatgtcccgtcagtttcgtcgtcggcactcgtccttccgggcgccgtgttcgactcgcggccgtcagctccgccgtggactcgctacccgagcctgagaggccgcgccacgcttgacgcctcttcctcccggcgcgtatgtcccttcgtcggctgccttgccaccgccgacacttctggcgtagccacctccggcaccacggtgcgtagttcgtgctgtacacgcgcttcgtcgccgtcattcggcacaacggggtccttggtaacttggtatgtgccacctccgtccaccgtcactgcttctcgctcgcttccgtcgcccgcgccgtcgttggtcgactgctgcccgctgctgccaccactgggcctctcttccgtcgagggcggctgcttcgccgtctcgttcgacgctcgttccgtgtggatcacggacctcgactcctcgttcgacacagccgtcgtcatcggctcggccgccgcactcgcactccgtccagctgccgccggatcagttctgccgtctgtaattgtccctgccgcacttgtagtctcagccgcgacgccggctgctcgcacagccgctcgctctcttgaccgtcgccgtcggccgattgccgccagcaccgtagccttagtgggcgctcgtgaaagtgcatacgctacgccgttcgcagtccctggtcgaaagacgatctcgaaatcaaattcttgcaaggttaaggcccagcgatgtagcttgtcagtcagattagggctggtcatcggccacttcagtgccgaatgatccgtgacaatggagaatcgccgtccgtagagatacgggcggaacaacttaatggaccacaccaccgccagtcattgcaactcggtgatgccgtaattagcctccgttgcactcgtcaacttgctcgcgtatgtcacaggttgccagccgtggtcacgaacctgcacgaggcacgccccgagccccactttgcttgcgtccgtccctagtcgaaagggtagagtaaaattagggtagataagcaaaggtttgctcgtcaaatccgttttcacatgttcgaacgtgagacctgcttgtgagagcctctcaagcacgcaagctaacttcaaaatgtgccgttcaatgtcgccgcgtgtataaaccacaaaaccgtctaggtagactagacatgtagttcacgtaagcccgcgcaatacactgttcatcatccgttgaagcgtgggcggagcgttcgtaagtccgaagggcatgcgaacgaactggtagagtctctgcttcgtagtaaaggtcgtcttctctttgtctttggctgccacgcggatttgccaataccccgctttcaaatccaatgtgctgaacagcagcgcgccgccaagagcctccagcgtttaatcgatccttggtagcgggtacacgtcatttcgtgtgaccttttttagggcacgataatccacacaaaaaatgtacttcgccatcttttttctgcaccagtacgacgggaaacccccaggcaccgtcgccctcttaatcacgccggccgccaacatctttcgcacgttcgtctcaatcacctcgtcctcggtctgaacctgccgtctacgcttcagcatgatgggcgccgcatcgcccgtgtcgatgtggtgctcggtgctcaataccgtggcgggtggacaatcgctcttatttgccgtcagctgccggtataccatcagcaactgcacgatcatccgccgactctcgccgtcctcaacgcctacattaacctagtcctcgtcgtcgaatggctcagcgctaccactgagtccgtctaaccattcattgatcttgtcacggcgcagtgcgccgctcatctgcaacagctcgacgtccttgtcgagtgggatccattgcccaagctcttgcttcgctggcagccgcacttgtccgtccttcgcgttcaccgcgccgtgctgttcttcaccttcgtgacggtagccgccaacatacccgcgcctgtgcacttggtgggcaagaagatgcctacttcgccgtcgtcagccgccactgacacctcgaccggtgtcacggtactgccgtcgagctccgctcgtcgaaccacccgcactgccgccacacgcgatccctttccgctgtcgtacgtgcgaaacggaaagaccaccgcatgcccagccgtagtgtagcgaatctcattgcgatcaaagtccatcatggctccgtgcccacgcatgaagtccaccccgagtaggaattcgttagtgcaacctgacaccatgcatgcttcaacacgaatcacttcgccgaacacactgcgcgtgttcaaactccatgcgcctactacgtataacaggaaaccaccaatgccttcgacgtaatccacaggggctgctcgctccactcggtcgccgaactgggtgcccgccaccgtgtagcgtgcgccgcttgtcgagcttcacgtgtcgtcttgcgccggccacatccatcgttgcggttggaagcccgtcatcctctcccacgtactccacaacttcgtcacgcgccgtacgccgtgcgcttccatcaccacggtgctgtacgatgctcacgcgcgctcgttgccctcgtccttcgtcatcacgctgctcacgcagctgcttgcgctctcgcagctgctccattgcttcgtcagccactcgctgtcgcgcagtccgttactcatcgctcacgcgctgctcctcagctacattctctcgctcgcgtcgccgtttccgagccatacacaccttgactcgttcgtgcttcgctcgcttccgggctcttcaccgtgccaaacgcgccagttctacgctgccacgacctacagactcgtcgttcgagtctgcacttgactcgctcgtcactacgtcttccacggccgtcgtggactcgcccgccgccatcatcaccttcccggccaccgtcgtctccacagactcgccggagtccgccaccgtcgacaccaacgactgtgtcttggtcaccgtgcacgtcttagccgtgcttgtcgtcactgggggcttctctttgcctgtcgtggccctgacgtcgcttccgccgtcactcaggggcatatcctcttcacccacgttcgactcgcccatactcgtcgtaggaacgtcgctcgcgtcgtcgtccaagggcccgtccgtggccttcgtcgcgcccagcttcattaccagtgccgcctctgtcgaggtcgcacctgccgccgccgtcttggccgccgtcatgactgtcggcgtcgagcacgtgtcccgtgctgtcttcccagtcggctcgatcgccaacgtggtcgacatctgcttggttccgccctccgtcgactcacaggggttagccgtcgcctccgggctcaccgtcgcgccttctccagctcgagggtctgcgccttctctagcttgtcgtccatcgccgtcgcgctgcgcggtatcttcgtctcgatgcacaggctggcggtcggcccgtacgtatcgtgctgccgccatcgccggccataccgtggctacggagcgagccgctcgttccttgtccgtcgccgcagcatccgccttcatcatgcgcacgaccgccgtcatgccaaccttcgacgcatccggcgtgcgcgtcaccacgcacacaggcgtcgtccgtctcttcgactcggggtactcgccgttgctgacgtgctccgcccttgcctcgtcctcatcgttctcatcgttttcgtcttcgcaggacacggccgtcgccgtatctccactcgccccgtccgtctttcgcgccgacgcgcgcaacggtgcgggtctcattctcatcaaggtgtgtttgtcgccagcggcggcacgcaccaccctcatctcatcgttctcgttctcttccgtgtcggccacactcgcagccgtcacgtgcctcatcgtttttccgccgtccttactcatcgctagccccaccggctggggggttccacctcgcaattccccctcgatagcgccttctactcgttttccgccgacaccggttgctccttacgtccgcgcgtcatcatgtatgcgtcgttacgagctttcgcctcccaattgccggcgaccgcagcacacggacacgcacccgcgcacctccgagtccgtctccttcttcttcacgggctcgaggcaggcgggtccacgcacgttcgtgcgaagtggcccgagcgattacacgcatagcacttcggctcggtagggcactgcatcgcccagtggccagtatgaccgcagtgaaagcacgcaccgctcgccttgccctcaccgctcattttgttgcctgggcgcttctgctccgtcgtgctggtctcgacacgtcgcttgtcaatctccatccttcccgttgagatccagtaccagcaacatacacacaatgcacagatctcatcggcaaatctggaataggggaggtgatatcggcagcggggagcccgctatccgcggcggggagtccgctatccgcagcgggcgtgcatataaaagggatgcatctacccgaatttaccaaaagttgcagctacttcaaatcccaaaagttgtagctctttcatagccatccatcgcctgtctgacgagtcaaacagtaaatcatccgcttacagcttgctgcctgcccgtctcccagttcaaatgccttaaatggctacatatcctgcctctaccgccacgccacgagcaacgccaccagctcagtgggctctgtgccagcggcttccccatgctttttacagtggatacgtctcgccagcaactccacttccagtgtctcgcatcgaggatagagcttcgcgtgagttactttatccggaagagcaagtcgtcgagcagcccacggtactgcgcctaccgtcgcagcgcatttgttcagctcagtcgttttacggctacggagcatccgccgtggctgggccagcggcttcgttgatacaagcgagtgcaacatgagctcaatgaactttgcgagggttgaacccgagcattggtatttaccatgcctcaaagagcagcattttgcgtcgccagtgttggcgcagaaagcattgaacgactttgggtgccaacacggttacgcaatggcttacaaaggaacgacctccgataaattccgacagcgtcagctcatccgctatggctgcgatcgccatgcccccccccccccccccgacgtactttggtggaaacaagcgtgcagcaacgtcgcaacgcaagtagcagaaagtgtggctgcaagatgtaagtgtacttggttcgaaagttgaggactgatggagagattacgtgggagcttcagcatcgtggacgagcgctagagcacaatcacgctccttcctcccacccggcctcgcacccgctccaccgccgagctgctctctctctctctctgatgctgttcgattggcaattgcaatcgatagtcagactgggacaactgcccgccaaactattgcacgacttctagttgaagacccttccctgataattacacctcgggacgtctacaatgagcgatatagaactggtcttgtcgcagtaggaagtctctcacgaatgtctcacgaatggatcaacgatctttgttggggtcgtcaaagttattcatcgaaatgccttgcatcgcgtgctagagcccgagcgtattcaagatcgtagagctcaacgtgcagcggagcgctgagctcaacggcatatggcaggagccggaccgagggggacacgtcgaatcccctctgcttttgaaaattaggtgtgtacaagtttatcatagctagatcataccatcgttagcggaaactaccccttcccttgtatgtggactcagcttcatggtgtggatcgttgatttaacccttctagccccaaccttattctgtagtgattatacagaataagatgacttgattaaagtatacgtcaaaactgctggaggtatgctattttacagggtgacagtacagcaatcgtgcacttccagcacaaaatagctgcgaacgtggacaaaagatgaacaatgtatccaccatctgataaaaatggtgtgtgctcattgtgcgaaacaaacgtaacacacacgttagtacctttagaactgcaatacctgtcaagctcggtatgagtccgaaccgaggagcgttaacagcaccagtcatccgtccttcatgccacgcggcgggtgaggcccaggcgctgaggataaattgtccagttcctaactgacggagtgaggaggaactggacaattatttcctagcgtcactagacctccgatagacttcgtgtatgcatctattcgctccttacgaatcctcgccatcgtcttgctaactagcgctggtgatcactttatcgtgctgtggcgttcgctcatgtccgtcgcacgcacagtatccataagatgtaatatacgaatgtattatcgataagctctgctacatcctaaatatacagcagcatgcgggctaaacgctctcggtggtcaccccaggcttcgcgcagtgtacggcaaagcgtttgctagaagtcccttgttcagtagactccgtttcacggccgccttgccctgtagcatccgtcgtattcaaatcagcacaaatccttattctgtaccttccgctgtatccacttgggttggtctggtttgctctgtagcatccgtcatatccatcgctaccggactggtctattctgtaggtaccatcacaataaattcagtcaatacacgttggtctgcagcttccatctagcccctctatcgcatcgcctccatctgccgtttatcgcctaccaggtaagcgcctgaacgacgcatgcgctgctgtggagcgctagttgaagccgttgctagcgctgcggatgccatcatggaggtggttggtccaggagtgacgaacgcgcgcatcgatacttagtggtagccggcagcaccgcctcgcacggcgcactatgggctcgcgcgcgcttgaatacaattccagactgaccttagacaatatatcgaacagactgtaaatagacttgctttcctttagcatcactaccacgagtatactgttatggcgacctcgagctcccagtagcgccaggccctcgcctacgcagcagcattagcacgttcttaccgggcttgcagagatcgaggtacgtctggtcagggcggtttcgcgttccgaagtaaaaggcaccgcgagtggctgcctaacggtcactatggccttacaccccaattttccaacctgttggggatttatacccttctatagccgcagaagaatccccgtctatctacccatcacagatccaacgggaatgatgggctgattactcactatacaaaaaactatatgcgaagtttttcgcggaaaccaagtttgctggatattaaccctttcgcggtaaaaggatacagaaagcgccctttagatgattttccaaaacacggtagagtgtaccccctcttaaagggcgcatcctgtgccattttgcacaagttcaagctagtaatcaaccttctttaaaacatcataatcggtacgcagagtaatcatcatgtaatcagtcttaactaattctaagtcatacgcatacattctatgtatcctgcaaatcaccgtaggtggcatgtcccatgagacacaccgaaaaggctccgtaactttgtaaaaggacgcctagagcgcccttttagaaggaaatatcaatgagctgtatactataatttattgaggatactcgcgaaagggttaaatcctgtcgacatgcttattctgtaggatacagaatatggggctagaggggttaatgaggcggatcgatgattttgtaacgctgatcgatgatctaatgatgccgatcgatgatctccatgaggcggatcgttgatctaatgaagcggatcgttgatctaatgaggcggatcgatgattggatgatgtgaatcgatgagctaatgacaaggatcgatgccatgatgatgctgatcgatgtgtgcatgggtcggatcgatgatataatgttgtgtatagattccggtcgtaagttatggaagtgaaatggcttcacagtcatctccttcatctaacttctttatctcgagctttattgtcttctctacatggtgaccctcgtagctgctgtactcggctccgtaatagccaatagatacatctctttgtctttatactttgctataatatactgcattacaaatgcctttatattgtggtgtaaccggatcgatgattttataatgcagatcgatggtgtaatgatactgatcgatgattttgtaatgcggatcgatgattgcatgatacggatcgatgatttttgtaatgcggatcgatgattgcatgatacggatcgatgattttgtaatgcggatcgatgattgcatgatacggattgatggttttgtattgcggatacatgatttcccacctaaaatgtaagttaatatattcttcacagtacgtatcaacaacaggtgttatgtattaacgttgtttactcctctttttcttcttgtttgtcatccccggtgcccccagcacacctgtgggtatagtacgtgttcttcttgccggagtgagagtcacatacctcgcagtaggctcccttgtcgttattccgctttctcttagcagcaatcgcaggcttctcggggttagcgctgcaaaaccgtttgtggttattcatgtcccgcttatcgacacagtttttaaaacagtcaatgcagcggtaaacagcccacgccacacgctctacaacgccctcatcgcggtagacaccgtccacgttaatacgaccttggatcctaatgtttccatcggtgtacggggtgtcggcgtgggaaaggtcgcctcggtagacgacaacatctcccggggacagatcctcaagtgccgtacatttcccgcttagcgctgcccccgcaaacgcatcgggtacgattatgagcttcgtttcgggctctacaacaagcagcagggatgcctggacccactcatgcttgatcgtcgcgtcagcagtctccgcggactgaaaatcgcggtgcaactgctcgccccgagctgttggtagggactgcgccacggagatccgttccgacacactccacgacttgtgcacgttcgaggctaacgtcacaaagcgctcaaacagcaatcgaaaagcggcaggagcgctgtcctggataccaatttcctctacacggcgggctgggtttctgatgtctcgtagccatttcgtctcgctcatgctcattatttcgctcagcaacaacttaacttcgtcttggttcatgaacccacgcaaagtagcatagccaatattccaaaatgtagccatctcattaatagaccaaggttgcgtgatatcaacagcgcgctcgctattagtttatcttggcgtgcgactcctttggggtgtcggtcgggtccttggccgacgggatggacacgcgtgtccccgttcaatgtgctggagttgctagcaacctcttcccggacgctaccagcaccgtctgagccctcacatggagtcgccgccgcatttgatggtggatcatgtgttgagatggccgaggccccggtcggagcaatgctagcgacagacgatggcacacggacagtctgtactccggtggggccttgctttcgttgagccttgtcagccttcgagccgccacggccagccttggctccaactgggcctttgtccctacgattgcgtaccgccgtcgagtgtgagggcgtcgagtgcgagggcgtcgaaggcgaggacgccaagggcgaggacgccgagggcgcgttcaccgagtgcgcgtccgctgccgagtgcaagtgagcgggacttgaagccgcagcctgcttcttggctgcaggcgaaggcggattgcctgagcgtgctggtgggccgcgttgtttgcttgcgcgggggatgcgccggccgggagttctagccgcgttgcgggcaggagaatcggcagcgttgcatgactgcgcgaggctttaccagcggggcttgtgctcggcggggtggggtagaggaacgtttctactagatgatctgcgagaggctctgtgagcgactctcacggccgtcgagccgattgtaccaactttcgtcagatccgatgtgcgtttctttttgcagtactcatctaccacatgatttgtcagacttgttttttgtatgcacgcccgcggtggatagcgggctctccgctgccgatatcacctcccctggaatagcgatgtcgaatgtacctcgcagagctagtacagttatgcagacgagatttgcgcttgctggatgatgggtactgagtttagtgaaaaatggagggaccaggccttctagcgggaagcagcatgcaagtgcaagttgctaaatagttattatagcaggagtgaaaggatcatacatgtaatgaactttagataagttattgctgtcgcatgatgcaatcatgacgtcacacggtatgagcgacagtaccttgccctgaacgatggggcagtacggacattagaactccctaaacgaccgtcccaggcagcggtctacgtgacgcgatgctccgcgaccaagacaaactcttcactacatgtacaagtacgaacacaagaatatcggcgatattcggcgatacagtattatatcgccgaccccccccccccccctcaacgaccgcgctctgcttgaaaactgagccgacggtacaagacgaggcgctactttcccattaattgagtaattcagtacattagagagatttcgcaaatgtccgaatccgattcccgaggtggtcagagcacctttaatgcgacagcacaagagcaccggttaatggcgcccaaggcgccattagaaaagcagctggttttcaggtaggaggggaatatatagactgttgcctcagctttccaaagcccgaaacgggtgctaactttgactctacgcagcatgtaagcctgcacctggacaaacttttggtactgcgtacttcatagacgtatgttagagctatcgaacacactagcttgcatcggcggagtgtaagtaggcacttagcaggactcccgccacctcagggactccttcggagtgccaatttccaaagccatcagcatccctcctacactttaatggcgccgtaacgttaagggcgccctagctatctgtgcaaagtctgtgtaccgaagcaaatctgtacacagatcagaataataagggatttgtattgacggagagcagcgggacgggtgtcatgggctcatctggtcgtgttgtgagctgttgtgatgacacgttgccacagcaagcaaacctgcgcggagtgctcgtaaagcaggtctgcgcgattttgcgtaggtaggtcctgcaccaggcattccagcggatggacccgttgccgcaactcggtgctagttttctaattgcgggacactgcagcaccccagattcaccccctctttttggcttaaaggcgccgtagggcttaaaggcgcattaggcagatattgtgcggtcgcattaaaggtgctgtaacgcgagtctccgattcctaatccagttttcctggtggggtttgtttcggattcggattttaggcctcgttcgtttcgcaactcgagtcccaatcagaatctgcaatgcacatttctgggtagcatatggatggtgtggaccaccgactgcttgcagttgcagttgtctcccacaacacaactaacaacgctcaaacaacctcaaaatgcaatgcacgcatatacatcggtccgtttgggcgggaaatatcatacggtaggctatattgactctatccgctgtcaagcttaatcttacgatcgttttgaccagaaactacacagttaaggcggtgtatgtaatatacttttgctccttaaaccctcccaaaagcgtaatttataagctctgtaaaattgccgtgcctttctaaactgttactgcttatgtggtgcacaatgtttccatgtggtgcacatcgttccgtttcggattcagattccggaatgggggctaatccggacgtctggacccgaaatcccaatccgatttccaaaaacgagccacgtgacccatttttgtatccgtaaccgaactggaatcggattcggacacttgcgaaatctctctattcacacttctgtcaagccctttgcaagtttcgcaacctcgcagtttctattggcccgacctttccagatttgccggggcagactgtagtacattgtgtgtatgttgctgtacattgaatgtacacagtgaacacacgccagaaaatcttcgtccagcgtgcaagactgtacgcagtccacgtatatcggcccgaacagcagatctagacgagcgtggggtcttcccactgggaaggtaaaaggccagggattagtaaatgacgggtcgtctttgatggcacgtagcgtccaatgccccctgttagtaccgataggatgctccgaacgtgtgggcagcgcccgctgggcacgtgcgcaatttgcttaatgtagcgaatataggctcaatactgcatacagcctggcgctctcctaatcgtaatctaatcttccagcgtaccatggcgtgacggtgccgacagcggccgacacgctcgacatcaatcttattggctaaaaccttcactagcactgacactgatttgttaatatcaatacaattatcattggcttaaagaatccgaagacgacatgtcgctaaggacaggccacagagagaacacatctcaaccagcacgcagacagatagcgggagcggcgccaacgagcaaggggcgtccgcgcgtggggggaggcgggtcccccccacccgcggcagcggcagcggcagctcagcaaaggcgtgcggcaggcatgcagctccatcatgaactgaggaccaaggacatcggcgagatgatgtggtaagcactggggaagcttggtgctattgggctcacgtgtctgacgtttgttgatattggtgttagtgtgtatgcattaatgtaggctgtgatgcggctgttaagcttggtgtgctatcctatggcgtagtctagttgttttgcgacccaaaacttggtgtgccgcgaaagcagcttagcctcgttgtacttgggtagtcgttcctcaatggtaatacatgcgcttgaacccttcgaactattgtcttgtgcctgtgttatctagaagtgaagagctctgtgaagtcgtcgaagtggtcggcgacggcggcgctctggtgcaggttccgagtttcgaagtcgtccacggccgtggccagcttggtcttcaatgaaggttcgacggacaagggctctgcggcgtcggttgtatgcgacaaccatgttccgaggcagattcgtggcaggctcttcggtctgctcccactcaacaaggtaagctctcttaccgtttctcatgtatgagtttgtgattgcgcggatgttgtagagctgcggagctgtggaaggaggagcggtcatgttttccgtcgggacccattcggtctcgctcgcctcgctgtcgtcgcgcccatcgtcggcattgagcacgctaccggtgctagttgtgacaggtagaccgcttggagctgggatccagaccacgtcttcgtcgctgaagtcgtcaccagaatcagagagcggttgtgcagcgtcagcattggaggctgcagtggtcaccttctcttcggcgacggcgatggcggcgacggagagcttctcttcggcagcaggaacagcggtggcgtgcttctcttctgcaacaggaccagcggcagcgtgcttctcttcggcaacatcatcagtggcaagcttcgcagcagtagtgagggcaggtgtggcttcaacagctgtgctggtgggtatggcttcggcggcagtgctggcggggttctcgacggtgctcgtccaagcggtggcggcggcgatagtggcaacggcgcccctattctcctcagctcctagcggagtgttgactggcgcgaggttgccgtcagcctcacgcgcctgcgtcgagtcgtgggcagctgcatgggatgcattcgcgccggtactgggaagctgtcggaggctggggcgccgcgaagagcgccatgccagaacgtggtggccttcaattcaacgaccagtttgctgttacaacagcgagaggacgtcaaacatcggtccccttgggcttggagcctcggtaacctgggcacgctgctcgtggcaaaggtagcgtaaatcttcatctgtaacatacgcgagggggaactcacgcctaataaatgctctaacagcgcgcttgaatttcttctggctgaggtgaaccatcggtttcgtgttggcgattgcaaaatggtgaaggtatgccacagtggtttgaatgtgtaacgaaccttggggagtgtatttgctctatttaagctcatgtctttaataggttaaaaagctccatcaaactgtaaagtcgcatgatttctccaaaatcccaatgtgcttctaaaaacactcctttgtcgtttcaggagcagggtcggcgatctggccgacagccaaacttgcccggtaccgggtaatgagctccatctcgatgaagtgcgccaagttgtttcagtaggcccgagccgaacttgcgcttgatacctcgcgcttgaagaaactcatgcatatgcttattagctgtgttgccagcttgcatgacacgatccgcgtactcaccagtggtagcgtcaaggctgaatcccagaggtaggaatagcttcatgaaggcgacaacctgctttgactgagacttgtactggcgatagtcacagacttcccagatgcgaggggttttcgtgtaccactctaaccaagttgcggctgcagtcttcgaggctggcggaccttgggcttggttggtttcatcggggtgtccaaggccaatgacaggtcggtacgctcagtgatcgtgtctggagttgagccggcctgggaagcaactccaccaccaaccgacacccgtttttccaactctgaattgcgctcagactgcgccttgttcgcttccacgagttgggctatgactgcattgagatggttgatcaactgaagctcacgtgtgaagggtttttcttcttcttctcgaacttcacttgcttatcgtttcagctccacactccagcctagcagctccggcattgacacttgaagagggaaaagacacatgcgcatccgcgaattatatgggctcatcgggtacctctcgttgacctccgggaagtgctggatcaatgatgccactagcaggtctgcgacttgatcatcgacgatcaatgaggcgtccccaagatccaagctggacgcaaacaacatgcgaccaagcctgcgaatctatgtcgtcgttgcagagtcgaatgtggcagccgaaggtatggtcgggttgtcgtttgacttccagtcgctgagcactttcgatactttcctgtcctcattcgtggtgttaaaaacgtaggcaaaggccttgttcgtcgccgtcatattccaactgccacgatcgaagatccattgaggacttagcgaagcatccgctttggcatgcggcgcaccgccccgccgggaagaatgagacgagaggccacttaaaacaccagcatcagcttgacgtgcgcttgcggccttgagcactcgattgacgtacccttgcattttcagcggggtagacttacgtctcggagaggtggcttcgggtgttgcattagcaggttcatcatcatcgctacagtggacaagcgcatcggtaagtggcgtagcctccgttgcaggcgcttcatctccaacgttcagccccgaaaggtgctcaaggtcgagtacagacgataccgggaatgtttgcatcgccagtgtcatggcgatggcgtggagcggacacgtgatgaaggagctcttgtctgggaagagagagaggccttgctcctccgacgttttcgctgggatcaggcgaaggaatagcacgttgcccgagccgaccgacaggttgcgcttctggataaacacgagatcggaagcgcgtccaagcgcgtaccacatgatggataggagcgcagcatcctgatactccttggcagaactcgcatctaagtatagtccgtcgatcagagagcgcaagtcttccttggtgcatgctggcgccttcgtcaccataccaccttgctgccgtttgaggcagtgccgctccaaaatgcgacccatcttgagtagccactgctccacaatgtggcggtgctggaggaaatcctccagcagccagttcttgacgttccggtagtagctcatcacggtgttccgcttgcgtagatccccgcttcggcctcgagcaaacgcgaggtgcatcgcgaagcggtccagcaacttcacaagcaccgaaccactggcatctgccaggagggtagcgcgaataaattcgagagtgacattctcggaggcgaggaaagccgtgaagacgttgactgctgtcgcttgcgcacgcttcgtgttctctggagcgaggtcttgcaggctcattgttttcgagtctagtgtcggttgtcttcttgatatccagcaagtatgtgaatgacttgctttttgaatcggtgcccaaatgtctggctgtcgctgccgacattacgcgtcggccacgtgtcggtagtcgttaccctacccctattgtgttttaattggctaaaatttcgctggaacactgtatgattcgttaaaagtcttcagctgtgtttctattggctcacaggaccatacaaaaatcaagtttttagtgtatgctgtcggcagtttgatgatacaagcgagctggctgcgccgtaaacggcgcagcgctctaagtagccccagtttcaatcagcggtttttattgctatgattcatattacttatgaaatatatgtacggaagttaacacccacacgaaatcctccaccctctccaagacctgcacctgaatcaaagctgttgcccgtgttgggccaactcggttggctatatcgacctctatctccaatctagatcgagcagatctgtatcactaccaaaaagaggactctaccatgcagctcctataaatgtccacaaacacaaagaagaagatgattttgatgttaagtttttgaaggggagaacgcacccccgtgtacgcatcttggagagttcaatgttagcaccacgaacgccatcatccgctcgaatgatagaactgaatacgacgccaatcgagggtttggatgcacccgacattgtagcaaccaaaaatatggttcgactgtattttagcactttggccttcaaaggtataatgttacagaggtgcaccgcgtattcggcatgggtacataaatcggctatagcaggaagccatatataatttgtcactggtacttgtaatgtattcaaatcccaatctactatcttggggtattgatttataccggtgccgaaaacgcggtgcaccactgtagtagcataagtacactcgtcaagttactcaaaagcaatcctatacagttgtacacgatggtgtccgctagcggtacgtaccatcaggcaggtttcaacagcgtgatcttgagaagaaaagatcgtacttacccgaataaatacgtgtagccaaaagcgtgacatactcacagaaaaggagtttattagtatagattcatccactagcgctctgggcacccgctacgcgggcgctttgaccacgggttgctggaatagcatagcttaaaagtatatgcatcattttgatttccataacaataatgtgcggatacagttgacacatattcgttgctataacttcgtgctttagtggcaaatgagtaggaatacattttcctattaagctaattaccaaatgtcgctcacgatgcaaagttgagtacctaaacatcgagtgagctgaatatcgttgtcgttgtattattgatcacccgtttctgcgaggcgagctacattgtcacggacatcccttactacagtgacctgcgtgtttacttactttgaagtaataactaaagtattgaaactatgattgggtgtggtttatactgcgttgcaaactggtagctgtcgtcgataccgtactctagtgttgttactacgttagcactgaaagaccgcaactttgccagcatgaatttacgcactgcaccgcgctacatgtagtaatgctggtttgcgcgataacagttcaaatagacatagcaaatttagctcaactcaatacggatcggtagcgactgtgcgtcttcgatggttaggttgttgtgtatcgtgtatatgcatatgaagcgtttggcgggaccccggggtccccgcttgccccgccagctgtcataagcaaccgggatattcggtaaattcaagtgctgcatgtttgtatcgatgctatgtatctctggtagtatcgactatcgagttgcacagagctgcagagttcgcaactttgcgtgcccgacgccgctgctgctgtagtaggcgctagcttctagcagtcagcttgaatcttcttggtcgtatcttcaccaagacgcttaacagaacgaacgaatgcagcagctttgtggtcacgacgatttcaatacttaagtatcacgtttgcgccgaggaacctctgcacctccagttcgcctagacttcatactggatgctagatgcttgaaggtgaaatgagctctagctaaactcgaaaaattatcacaaaattgtcacaacatatatgttatcactgccccgccgataaaaataaataattccggtcgccatcggtacatgatgcgggaccccggggtccggcctactctgcatctttcatctggatttataacgcgttattgctcttggtggtatttagtaacagtaattcgaaattgcgcacgaccatgctgttgtgcgctgcgcgcaattcgagcagcattttctaaaattgttttgttgaagcgcgagagttagggtacctgggatatgatcgattttgatttgagttggagtgcattgttgtcacttagctgatgcgactatcgttcctatggaagcgagtgtcggactgcagcaagatcctgccattaatcagcttaataaaaaacataaaaagtcgtaagtatgacgcctcgatgcgcgcgctggtgatgcacctgggtttacttaattcgaccaactactacgtagtagtaacttaagttgagcacgcgactactcaaattggtgtattataatgtttgattcctgcaaatgaatacagcacgattgccagctacaccacgccgcgtgctgtttatcagttaatctatgtgcagcgttaggtgatctaaatgcgtcgttcgcacacattcttggtgtattagaagatgaacgcctaataagcaccagtctacccctaattccgtactgtaaaccctcaactgccctgaaggtaccagttatcccaacaggcggaactcccgaaaccgtacagtagtttatttatgtatggacatgcagtactcactgttgtgtgtgtccgctgccgctgcagttcgccactcgcttctctacgccaggcgccctccgctcgctgcctcggtccgtccgtccgccgcgcgccaactttcaaatggggaatgtgataatcatgcccgctaaagtccgaccggctccgtgtaagtccgaattttagcgtgattgtggctatttttgtaacttcgtagatagttaaaaagccagttccagtcgacttgatgagtgaataatgtatgcaataaggccgcggtagcgtagtctaattgacaggtctaggctgtaggggcggaaagcgtgacgcgatgaccgacagacaggattctcggttagaggacggagaatgtaccagtcacatcgacagtgtcgttacgaccccccaccaccaccacctcccacctgataactatctctgcaagtcccggttcggggcacagttcattttctcgcctgcaatccggaccatgaagctgttctcgtttcttctcgccgctgttgtcgccgcaacgctcacctctgtggaggctggcaagatcaatcatgacaaggtgcagccattccctcagccggttcccatcaccgcctcggagaaggctgccatcaagttcaaaccgagtctccagatagtcaaaggatgccacccgtaccctgtcgttaatgcggcgggtgagacgagcggggggctgaaaggaactgggaaacccgacggcgaatgcaaaggatcaagtcttgggtcgcaagtgtcggccgcgctgactggtacaagggcaagtttgccatcctgtacgcgtggtatttccctaaggaccaaggtttatggtcttggatcggtgccgggcctgggcacatgtgaccctgtgttcgactcctaccccgggaaggcctgccgaagatcaagtttgcgtccgttggagtgcgagctctagtcgaccgctgatgcaatgaaatgttgattcgagggacatgaaggggttgaccccttttgagggaaaagggaaaatccgccaccatttgtggaacattaagcctgcaagaatcgctccagtaagtcgttaaaaaaatagagggctatccaacagaggcgtgcaatgcgataaacttggtttcaacgcctctcctactaccctttgcctcttacacgcctgtagcatactgtgcggagcgaattccattgtcctcctctcccaagaacggatagtccgtgtatcctgcctgcacgggcatgtccggctgcatataaaatgttcctgagtcgaacggggtcagctctgcgtcaacacgaagacgctctacaagatccgggtttgagatgaagtagcgcccgaatgccacgagatccgccgacccctcctcaaccgtcttaatcgcgtcagcgcggtcgaaacccgcggccgcaatgatcacgcccttgtaggttccgcggaagtggtgagccacaccgttcactggtgtatcaacgccatctgcgtgacgcccacgacgctcgatcacgtggaggtaggccaggtcatagtcgttgagcttcttcaccacgtagccgtaggtctcacgcggcgtcgagtccttgcagccgaaagtttcaccaaaaggagaaagacgaatgcccacgtgactcggcgcgacgctggacagaacggcctccaccacctcgaagatgatccgcgcgcggttctcaatgctgccgccgtacgcatccgtgcgtttgtttacgccgtcgcacaagaactcttcgagtagatacccgttggccgcgtggatctcgacgccatcgaatcccgctgcgatcgcattctccgccgctgtcttgtagtcggccacgatgccagggatctccgcgatgtcaagcgcgcgcggagtcacgtagtccttgcggccttcacgagtaacagcgtggctcttgacgttgtccatgctggtggcgctcgaagacactggcagttgaccgtccggttgattcagagggtggcccacccgaccagtgtgccagagttgcgcgaatatcttgccccctttagcgtgcacggcctcggtcaccgcctgccaacctttgagttgttcttggcggaataaccccggagccccgtagtatccgcgagcggttgcgctgatgttcgtagcctccgtaatgagcaggccgccatccgtggcgcgctgctggtagtactccttcacgacgtcagtcggcacgcctgcatcgcctgaacggactcgggtgagtggggccaacaccacgcggtggtttagttggatcgggtccttcttgccgccgagggtgaggtcagagaaaagcttgggtgtggaggccatggtcgagttggtaggttgcttggggctaggaggaaacttgaaaagtgagcagcaccaagcagagaaattgactggtgattgacaggaagtgatctatccccgacggcttgcgaatcaaataggtactcccaccgtctcaacggtgcgctgatatatttccgcgggaccgtaagcatgaaatccaaatgcgctgcggttgggaaaatggctccgtagctttggtgtcgatttgaacgcgggcggctgagcatgcatgcaatcgataggcaattcatctaatgagcgccaagcatggtaggggagagctctgtgcatggtgaagctcctgtgagcagctcatctttcatttggatcgaatgcgctccggatactgtcgaagtgatcgcttgcgacagactctagtgactaccggtgcgtatccttaccattcccttgctgatggaactttagatatcatgccagcgtgacacagtagcaacgttagcaccactcgtacccccggttaattcaaatgtgcagcattattgtatcgtgcaagcgcgactctttttctgcaaggctagcttctcttcttcaagcacgcgtagccttcgttggagctcctcgcgctcttttgcgtcgcttagcgcacgctgctttaacatctatcgaaccacaaaatcgatcgaagagtagattagataaaagtccaccgcagcaacgaacaacaactcaattatactcacttcgagagcctggtcggtggaggtgatgttgacctgaaagcgctgggcgttctcatttgtagcttgtagctggtcctccaactgcttgcgcacttgcttcagctcctgattttgttgatcacgcgttgctagttcgtgttccaacaaggttcgtgcgtgggcctgttcacttcgagccacttcaagttcttgcgcgcgttttgcatcttgctgtgcttggagttgagtctctaatcgctcacggtcttttgcctcagctgcagacttcgcttccgcgagctccgcttcaacttgctttcgacgtcgtgcctcctcggcggccgcagcttcgcttgctgccaaggctgcatcgctgtagttgacactggtaagcgtgggcgctacaggcttcgcttcaacctcttttgcagcagtggtctcgggagagtttagtggtaccaacaggaaggtgaactgcaacattttggcgtctacttgatcgatcagctcgtccgtcacaaggagctttacaacctgcacgcatcacatgaatcacgctcaatactctggccgtttaggtagtgatagcaacaagtttgaacatacattggtgtgatcgaccgggaggcaaaaactttcacttggaggggagatttggtactgcactcgcagtgtctcctgagagtcttgcgcatcaggtacgatgaacgagaatggcttgcttttgccaaggggctgaaggcgaactaggagccacacgtaggtacctcgcaaggagctcagcgttcggtcactatcgtcggactcatcctcttcagactccaccttggtgtcctgcaagtcgaacttgtacttgtccactgatctgttgcttggagataggtggcggtgtgatggcactgcactagtgtggatcggggcttctgcgcgcaagaagccactcaacaattcgtcacgctccattagcgggggtcgagttgccgcacgcaaatgcacgtgcacggcttcaaacggtaaaactgctgccgattcctcctcactcacgacggccacgtcggtttcgacgtcaaacatgtagcgcagcggccgtaggaaaatcgcagcgcttcccacaacacgagtacactcatgtgggccggaggtcatggccgaagagcaccaaatccccagcacactctcaatttcccgacgcagttgcccgtcccggtccttcagctatctaaaacgttgcaatcaccaagaataaacggctgaaaacaggttggttctgggcgtggcaaaactcgagtacggttctctcacgtgcttattgtaatacaaactcatcgccccatgcttttcgtacctggcgttgctgatttttttcctactaatactgaatgcggctttttccgcgtgttgttctgcgcgcatgcgccatttttctcgaaattttttccgtcttgaatctggtgaacagcgccgtggttgcctgtgctttagctctttctgttgaatggcctcgagtaccatttgcttcctctctcgttctccgtgtctccgatgaacctcataccttcttcacctgtccgtcgaagactcgtttgaaaatgaaaatgacagcgactgtgcaaacgagttgaacgtcttggaatgtgcgcggcgcttctcaggggaatcgagtgcccctcggaaatacggcggtggtagcaccgcagtgggcttgacgagcggtacggagtcgtgtcctggcgagacctgaaagtttccccggagcatgttcatcttcggcatcgaagtcttcgagccactagctgtcatcttctccaactcatcagctggggacaacgatcgcatcatcactggcatctcggggtgccctgaagctcgcgatgttgtcgacaacggtgtagccatcatactctccagcgaaacgaaactcgtcgtgctcaacggactcgacactgctgacaacgacatacttcgatgcagtggactgctaaacatctgctcatcatccaaagatcgtgacttgtacagcacgcgctcgggcgtcgacggcacctcctgctttacggtcacaattggctccgggaccatctgcgccatcgccgccactgccgctgcatgctcggcagctagaacctcctgtttcatctgcaaagctggagctggtgtcgatcttccatcccccatctcgatatcctgttgctgggtctggtccatcactgctccctctccaaatccaaagtcctgcagcttcttgccggacccgaacgtatgccgcaacaccctcttgtggtccttggccaccacggccgcagccacccgctgctgctgagtctgtacccggttcgcttggatagcgaagttccggcactgacatccctgtccaggtgccgtctcatgctggtggtgcgactgcagcccagcgtcgtccgtgccgccacacagcagcatctgctcaatgtcggcgcccgcctcccccagctctgctaatggagaatatcacatcaacgagtcagacaataagattttaatcaaccaataaataaatattcctaatatgtatccatggatggatgggcatcaagtttcttatttcgaatttttaatttaacgtaaagaatgaatgataaattacttacccggttggaagctcgaggcgaagagaaaatccgtcgagtcgccgccgccaaagacgtcggacagcatggcgctgggccggaagacgtccacgtcgatgtccatgtccatgtcgcccacgtcgacgtcgtcgccctccagcggcagcagcagcgcgcgccgcacgtgctcggaggcggcggacgacgcgtcgttctcctgcgagcccacgggcgagagcgcctggagctcggcgtcgtccagcgcgctcacgagctgcatccccacgggcagcgccgccatgttggaatggctggaaatggcgactgaagttgcctttggccatacaaagtcgaagaggaaacgcgtgcacggcctctcattggacgatatttgtgggcgggatgggagacagggttgccatgcacatcaaattgtgtacgcttgctgtagagttcagctgtgtagccatgcgtgaagccagcttcaacgtcaacccatctcggatccgagagctgaggcgcatgcgcctgccggtcgtgagcggcatcgccgtgacagaacccctagctgtaacacaccgtgatccgggtaggccgcaggtgcaatcgtttcccagcgctcttcctccaccgatgtagtatcggcacgccagggacaagtactggggagctaccttgaacgtggaggctataataacagtcatcaggactccaggtacgcgctcactttagatttgttgttacttggtttgtactcacatcggtttggcatacctcctccatagttcggataccttttcgctcactacagccaagagcatcagggtgccctggtcaccacggtatcgtagcaacttgcttagcaagacctttggaatgcaaaaaataggatgcgccaagtacgctcaagcgcgcgacaccatcgtggaaacgatgcctgccgcaccacgtttcagcgaagttcatctcccacatccttgaattttattcgctcatacacacttctgacttcactatcgaaggacatccttcagcttaaccaccggacactcgcacgatcagagcacgcgtttatagcttggcctggtagtattccttcacaggaacgtgcttcgcgccgccgtaaaagtcgagcaagatgatgttctcaatgtcaagaacgtacggcaagaatccatgcttctccggccagtctttcatctgcgggtgcctaaagagcacaaagcattgtcaatatccctgagttagacattccacttgtgtattagaaaatgcatcgatttcagtattgcgtacttggagaacaaaattttctcggcgtactggcgctgatccacgggcacaggcaccacgttccccgtcagcgtgagcttccagcacgttgggtcttccacgtccatcttgcacgcgtgttctccgccctgcgccatcgagatagccaccgacgcagtagaattcacactgaggtccgatcctacacaggcgacagtaaaacaaaagagaaactaattaacacttcgcctcccctgcagcataatatcctctctgctccgtaccagctgcatccatcggcgtgatgtagaagaagagcttgcccgtcgactcctccttcgagtacccaatcccgtctgccccaagcaaacagcacaattttaattagactcgtcaaaggcaatattccccatgtgttccccatttctcaagaataaacccgtaccgctgtacgacaccgtgcttccgtacgggaccccattgaactgcaccgagatcgtcgacagcgtcgcccacacgttgtcgtgcaccaactgccgcgcgtgctgcgccgagctcgccccccaatatctgccacaaacaaaaacttcaaatgagaactcctctaaaccaaataaaataaaataaaaatcataacttcaagaaggaactcacaaatcctccgtctccgcgagtcggaacgtgtccggttggaagacccccaccgcccgacgcgcctccaccccgcactcgaggctagtggtccacactagagccagcaacgcagcaataaacttcatctttcttccacttgagcttcaggcgtcactttcgatagtggagagagaccgtgaaaggttccgatgtcatcgtcccactctggtcactttttgagccaattgcaggccccatatcggatttttccgccaatcggacgggcacatggcgggcattggcttgaggcgcgaggtgctggcgctctaccgagacgcgctgcgcgtggcgagggccttcccggagcgcagcatgggccgcaagctgcagtacaacgcgagggagctgctgcgcctgagacagcgcgagcgcagcgaagcgcgcattcagaggcacgtggcggaggggcgggacgcgctggaggtgtaccgagtgctgcagaacgaccccgagctgctcacggccatcaccaggaagaaaagaccggctgcttcaagctagggacaagtaacaatgctatgtgtacgctcttctagtggtgggcgacgagagctttgaacgtgttgagttcataagaatgcacttcatgtacttcgatgggtcttagaggtgtgtgaggactcccccaaccttatgcagcgaagtctttccatctaacgattttgtcacgcatttatagggcatggagaagcttaggccgtggtgaccgaaatgctctccgccagcgtgtacgtctggccggcggggagggcctgcttgacgctcacgcggccgggctcgacggcgaccatgttcttgtactcctcgtcgccgaagtcctccatggccttggcgcggtcggcccacgggttccagacgacggcatcggtctgggtcttgacggccttgctgccgttggagatggagcccgacttcttgatcgtcaccgtacggtccacggcgttgacgcccttgatcacagcgtgcagcgtgttgggggcgttgctgtacacgttgtccgtctggttagcgaagtcgatgtacgcgcgcgtctccgtggcgttgaccttggcgaccttgtcgtagtagtcgacgcccttcaggcccaacacctgcacgcccttgttggtggcgtcgtccacccacaggtagttgtgcagcagagcgtggaactcaatcgggtccttgttcgtgttgcgcacgcgcagagcagtcttgagctcgttgccgtacagcttcacctcgtactcaagcttgaagtcaacaggccacatcttacgcgtagagttgctcgactccatggtgaacttggccacactcgggctgttcttgtcagcagcattcttgtagctggccagcgtccagttggtgatgcgggcgaagccgtggctcgggaagcccttggcgctgccgaagttggggaacacgacagggatgccgccacggatggggttcacgccgtcgaggaacgactccttcgacatgaacagcacgtccatctttgggtccatagcggggtggaacgacttgacgtgggcgccgaagtggtagacctccgcgctggagccgtacgggtgcgtgagcttgacggtctcgagctcggcgttggcaacgccgacggcggccaggagcgacgacaccagggcgacggtcttgaagatggagaacaccatggtggagtgggcgagacggcgagggtgtcgagcttgctccgtaggagattaattgaagaatgagagctgattgaaccgagccggacagcggcgttttaataagaggcagagcgtgcctggtttcgttcttggatggtgacaaagcgtaagcgcacatcatggagataccatcaggaaatctgtagggtgtgggaagttgtcggatcgccgactggactacagacaacgacggataaatacggcaacgcaaaacccggcacacatatgttgtactttttacaataagttattcataaagccaatcagcttcgagagttacacttgacatttgtattcaatatggttgttaagtactttctctaaatctgtgtgaactttatgctccgttacgtgtactttatgtcattgccttgtacaatctctatcgttcccgacagagaattctggcacatttactatggaggatgtcattcagttatgccggatttatccgtcgttgtctgtatcgtcgatgcactattggtggtcgatttcaatgcaatggcggcaggatccccggacagcgcgcgtgaagacagctgggagaaggcggtggtggcggaaagctgctcgagctacctgcgaagcggagacgctgtcggcacacgtacatacacgtccaccttgtttgacagatcaacgtgtacactatgtactgtattgtcttcacgagactaaaataattagtccctcgttaatcagcgttacaagcaacgcgatcatcaaagccgccggcgcgaagggtgtcaaacagttggcggctttcgcagtccacatatgcatcgacggaagcgttacgctgggcgtagagcggcttcacgcaatctctggtgttggccgaaaacattcctctggtattcttagacgctaggcattatcttcacccccgtcctgctgttgatacaaactcggcattaccaagatcgtgcggccaagtggcgttgtcatgtgcatgccgaccagtacgtacagtagggaaactccaaccttctgggtcatcaccacccagtgacgacttttattttagcttcggcgtgtcgctatgctcgaaacagcagattagtgtgtcattactccggcatcagcgttcagtatccgcgtcggatgcactacgttataatagcaatggattcggtgcagggtgtttacgtattattaggcaaaacattgtgaatatcaatgtaagctaatcggtagtcatcttcttcattgcgtggtatgtgaaatccctttcgaacctgcaaaaagtgtattctgcaagaagcccacgagaaaacatactaagaagtacccgactgacgctcacaatattcttcaacagcatatatgctttgataaacgaaagtacgaatttaatcaacagtgtgtgcctgttggaattgttgggtgctaactaaagcttagaagggtaaatccatagataacgagtgtctagataactacaactgtcaagggagggcggggtccactgggcaggcgtggatatctggccctcttctatgactattaatacggtaacgttgctactgcagctcgacgtttatttgtcctgctaccggggatggacaagagcgtgtttgctacagtacatgcaccagttatgaaagtggtctcgatgtggaagtagccgaacacacttcggttactttatttattaggccctatagtgcgcgtttagtcaacaagcatatcttacttttctttgctacaatgccaacgcagacaatacctgagttcactcacaagtaatacacgatgcgggacagtgtcgcggggtacactatctatactgtattcgacacggatcgggaaatattaatacatgttttccgctggtccgaacgggaattcaaataccacagataacgattgctggataccctactctaatcctcttctgtaaagtaatgttttgccatacgtgcacaccctgcaccgaatccattgctattataacgtagtgcatccgacgcggatactgaacgctgatgccggagtaatgacacactaatctgctgtttcgagcatagcgacacgccgaagctaaaataaaagtcgtcactgggtggtgatgacccagaaggttggagtttccctactgtacgtactggtcggcatgcacatgacaacgccacttggccgcacgatcttggtaatgccgagtttgtatcaacagcaggacgggggtgaagataatgcctagcgtctaagaataccagaggaatgttttcggccaacaccagagattgcgtgaagccgctctacgcccagcgtaacgcttccgtcgatgcatatgtggactgcgaaagccgccaactgtttgacacccttcgcgccggcggctttgatgatcgcgttgcttgtaacgctgattaacgagggactaattattttagtctcgtgaagacaatacagtacatagtgtacacgttgatctgtcaaacaaggtggacgtgtatgtacgtgtgccgacagcgtctccgcttcgcaggtagctcgagcagctttccgccaccaccgccttctcccagctgtcttcacgcgcgctgtccggggatcctgccgccattgcattgaaatcgaccaccaatagtgcatcgacgatagtccagtcggcgatccgacaacttcccacccgcgtaaagaacgttcaaaagggtcgttcatgtttgaaacagttttgaagtgtctaaaagtccaaaagtacttgccctccgcatcttcctgtcgagtatacattcccctgccactcctgcccttcacgcacagctcgttcgaggacagggacctttcaccatgcaccctgaaccagttgctggcacgctgccagcagctgcagcatccatcacgcctcgcactccacagtcagggaggagaaaccaacaaactccaggatcagcaccaaaaacgcaccgatctccgccagcatcagcgccgagaagcctccgatcctctcctgcctcagcagtgaggcgatctccacgctttaggccgtactcgagtccgacccaacagcccccgcagacacctagagtgctacggaagatggacttctcgtcgcctcaatcgtccacatccgcccggccgccacgttctccagctccgcccagccagttgcgagaatcgccgatgaagacggggcgcccgcgtgacgacatttggcaacactatggcattgagcgcgagaatggtaaaaagcatgggcgatgcagatactgcggcactcaagaaaaatggcaagccgagcggtaatttgctaaaacacatgatcaatccaggccagtgccctagtgtagcaagtttcgcttcggcctgcggatattcccgatccgaacccaacaccagctaagaccgcccctccccaagcagctgagctgagtcaagacgccttcgagatggcattggcacgtgttttcttcgtctgtgcacttccatttatgctcatagaggctcaggtattccgagactttatcgccatggtggctcctacaatgaaggtgccttcgaggcacaaactcagcgtggttcttctaaaacgtgtgcgagatgagatgcgcgtgaaagttatcaagttgataaacaagcaagtctacgtgtcgctagttacggacggatggagcgatacaaatggatcgagtatcatcaatttcatggtagtggcgcccggcatgccttcgttgttctggtcatcatggtcgacaaggtcagagcagcacacagctgcgtacctagtaggtgaaattgacaaggtcatctcggatattgaaagtgccacgaccgcacacgtcgtttctgtcgtcacagacaacgcaagaaacatgagtagtgctcgaagtcacatccaggcacgacgacccaacgtggtgagtggcggctgctccgcccacgtgctcaacctgctcatgcaagatgtgtgtcgctttcctgtaattcaagcggtcagatcacgagctgtggctgttacccgtttcgttcgagatcatttggctctacttgatgaattcaaggctctgcagcaaggcttacgcgatacgggtctaagcacaagaaatctggtgttgccggtgccaacaggttggtactcagtgtttgcttgcttgcgcagtgtgttgaacagtcgtgaagtactttaaaaattatttttgagttccgagtatgaagaattccgcgatcgatatcatgcaactgcgccaaaccggaagaaacttcgctacatgatggagctcgttcgtgacaacagcttttgggacagcctgaggaccatcgtacgtctgttggaccctataattgaagcactaagacagcttgaaggtgacaacgtgtttgtgtcggggggttataagtggtttcgatggctacggtatcacaccgcgtacggcgtcacctcacctgagcaagatgatgaagaggcagttgatgtgccggagccgtctgagcaagctggcgtgccgggaccatctgaacatgaagctgttgatcaagctcgcaatggaatcgaactccttagtaactcagtcgatcttttagcgcccaccaactccgccggatcgccgcccacagcgccagccgaactgcagtctgtaccagcaagcgaaacttcccctgaaagtacgtcaccggatgatgaaaatttattagcgggaggtaattacagacgtatcgatgttccgcagctcgacgagcttcaagaattttttcgtgacaagattcgaagtcgatgaagctacgtgcactccaacgcgatgagtatcgcattcttgctcgattcatcgacggatatagatgacttcgttggcgctgatgatgaaaaagttgatgaccaggtgtgtgaaatggcgaggcggtgtggcttgttcacaccaaccgtgggcgcccccgcatttactgcagaggtccttgcgtttaagagtaagaagcggcggggtggtaaggcgatgcgtgagaagtattcgatgtcaagtccgcgggattactgggaagggaagaaatctgagcgatacccactgcttcagaagatagcacaaattgtgttcgcgatccctacttcgtcggctgcaagcgaacgggcttggagtatcttactcgaagcggaggaacaggctctcagtggcaaaagtcgagatgcttgcatatgtgtatatcaactatggtacgattcgaagcgattcgatggaccttgcccgtcaccagtcgcgtccagaaagtgtagatgctgatagttaattgccatcgaataatacatgatactacgttttgaatctgtttttattttgctgaccactaagatgtccgtagtgctagttcaccaagaaccaagtttgctattgtgtcgtacagcggcaatccctcatcgtgcagcattagcagccgatatgatcgacgcgcctaaatgttggcagcgcgtcgcggcatctatcactttctttggcgtgcattagacctggtcctgtcgctgcttgtgcacaacgatatgctcgaagaaatcttgaactccgcactgacctcagcgtctcaccgagaccgacttgtagttcttgcttgtgggcacacccacgatacccacggtagcgctgacgcgactgccgagaaaggagcgctcgggctctgttctctcgattcagttcttgacctcggttgcgaaaagcacgctctcttcattggtctcggtggaagcggcagccatcttctccttcttctgctcgcttgggtcgcgaagtcggtcgggctggaactccttattggcgcccggcttagcgctcttgatgatgcacaggttcccgttgtcgcggtgcacccgcaggtgataagacttggcacatcgatgacgtcgtgctcgaactccagcttctggctgtagtcctccagctccacgtcgacggagctagccttgaactgaatcttcgtgttcatctctccgctggcatcctgacaggcgtcggccgagaagtccaggtcacccgaggagttcaggtccagggcctgttcgccgtcgacgctgtagtcaataccctcgccggcatccaggtcctcatacaggtcgccctcgccggcgagggccagctccaggtcctgctagctgaagatgttgggctgcttgacgcggtggatgcgcgggtcgttggcgagcgcgcggtccacgaggctggccagacgggcgtactcttttttctttcttggccgcggcctcgttcttcttggccatccagcgcttgtggtcgcggtgctcggccgagtccacgtcgtgctccgagtcgtgcgtgaagacgcgccacgagtcgaacttgttccagaagtcgtaaaaggcgtagacctcgtcgatatggaggtcgtcgccgcccagcgcggacgcgggcgcgggcttgttctcgctgaagcgcgcgttggccaggaacacggggccgtagagctcgtagaagctcttgccctcgtcagcggggtcgttctccttgatcttctcgtagcccgcactcgtcaaagtcgcactgcgagtcgtacgcgcgcttcttctgcgggtctatgggcgtggcgaaggccttctgcacggccaggtagttggggtcgttctccgtcttgcccgtcttgcccgggtggtgctcgatcagcacacggtggtacggtacgccttcttgaactgctcgtccgtcacgtcgaagtcgatgtcgctcagccccagctgcagctccaggaagttcttgccgcggatgctgcggcggtacttgcgcaggatgaactcctcctgcttgcgcagcgcgtcgcgcaccttggtggcgtcgtccaggtcctcgcagctggtccagcagccgcgggccatgttgcacacgcgcttgttgaaggcgcggcctacggcctccacgcgcctctgcgcgaagtagccgcccaggctcagcacgaccttgggctccttgaagtccgccgggggcgtcgcagcgacagcgtcagcgaagacatcctcacaagtctctccttgtgtcgagggccgtcggagccgtccagcaccactcggcgatgtctgagccgtgcagctcgtacatgtcgttcgtcgttctttgtcgggggagggggtgctgcaccacattggggcgcatccgtgatcgtgaggcagcgtgcgcgcggtggccgtgggcgcagctccgacaggtcgcaggtggacagcgtgggagacatcagcgttttgcaggggtgtctaaaagtgtctaaaagtcaccaacattagagcgtgttcgctaggtagctggagatggagatgacctctcatcaactctatttcttgtcttttgattggtcaaaatagtttagttcacaacgtgacaactggagaattaccccatctccttctccagctctgggagctggggaaggagaaagtagctagagattgaggcagttcagccgcacacacaatgaacgaagaggaagctgtactggttgctacatgctcagctgtcgcacaggttgcagtcctcctatcaggagaatccgacgatgcgccgcaaggccctaaggaacagattcgtaccgtgacctcactgcactttgagcccatgctacagtcagccgcgtatgcaagttggtttgaagacaatcttcgctgcaccaagccaactttcctacgtattgctggtttactacgagatcaaggtgttctgtttgctgctgccaaagtacggcagcatagctttgagaagaaagttgcagccgtgtcaaaacgagcccgcagcagggcatcagctgctgcagtcgtccacgcaaaggagggttgcttcgtagcgatagacgtttcaccagtattggccttcttcttctgattcccaacgcggcgatgtgagtcttggttgcgggctgacgcagctacaactccgagcgcaaaaagctggctgggtgtctctgaatgcggcagcgccagcgaggaagtgcgggcatccagctccgtttgagtagtggccggtgtcgcctacacagtctgggcaagagcaacatcagaggcaggtatgtccaaactggcagcagccagcacgaggtcgccactggctgacgggaacggaggcgcagctctcggagcgtcatcggcagcttgctccatcttgccacgcgtccggtgtctcgggcacagtgttcccggccgacgaagaacagcaaagaaaggagaaggagagcgagtcgcactgtgattggctaattttacctagatgcgctctgttgtagcgaacacgctcttataccggcccgtggttgataatattctatctgatagtttaggacagttttggattttgaacggaattttggacgttttacagaagtctttgggaccgttcagaactttttcaaaccatccctacccctacagatttgctgatggtatctccacgtgtgcgcttacgctttgtcaccatccaagaacgaaaccaggcacgctctgcctcttattaaaacgccgctgtccggctcggttcatgcagctctcattcttcaattaatctcctacggagcaagctcgacaccctcgccgtctcgcccactccaccatggtgttccccatcttcaagaccgtcgccctggtgtcgtcgctcctggccgccgtcggcgttgccaacgccgagctcgagaccgtcaagctcacgcacccgtacggctccagcgcggaggtctaccacttcggcgcccacgtcaagtcgttccaccccgctatggaccccaagatggacttgctgttcatgtcgaaggagtcgttcctcgacggcgtgaaccccatccgtggcggcatccctgtcgtgttccccaacttcggcagcgccaagggcttcccgagccacggcttcgcccgcatcaccaactggacgctggccagccacgtcgacgcgaaggacaagaacagcccgagtgtggccaagttcaccatggctgccagcgactcgactcgcaagatgtggcccgtcgagttcgagcttgagtacgaggtgaagctgctcggcaaccagctcgagactgctctgcgcgtgcgcaacacgaacaaggacccgattgagttccacgctctgctgcacaactacctgtgggtggacgacgccaccaacaagggcgtgcaggtgttgggcctgaagggcgtcgactactacgacaaggtcgccaaggtcaacgccacggagacgcgcgcgtacatcgacttcgctaaccagacggacaacgtgtacagcaacgcccccaacacgctgcacgctgtgatcaagggtgtcaacgctgtggaccgcacggtgacgatcgacaaggccgccttcatcactgcgaacggcaagaaggtcgagaccaagaccgacgccgtggtctggaacccgtgggctgaacgtgccaaggccatggaggactttggtgacgaggagtacaagaacatggtcgccgtcgagcccggccgcgtgagcgtcaagcaggccctccccgctggccagacgtacacgctgcaggagaccatctcggtcaccactctgtaatctgaagtactacggagtagatgtgatggaaaaatgtagacggaaatcgttgtgcggctggcactcccactcccgcctacaatacgaatcgaaagagtaaaactcaattgcatgaaaacccctctcctcttcctcctagtcaaggtttaactttgcgacgtagtagtaggataccctacgggatttcgatgaaagataaggtcgcggctggtacgccggccatttcagacactatttacaatgaggttgaaagaaagattggtggtgctagggatgcaagacacaagatacgataaaatacaactgcggtaccttcggtttgcaagtattcgatgaacgaacaccactgcatcttacagacgcgagaggagcgcgaaagtccagacgaaaacctgtgcccatgtagacaaaggactcctctttctttcgtgcattcactatatccgtgggcaagcgcacttggccagtgtcgaggagggttggcagaattcctccttgttgccgactgtacgagtcagactcgtaaactcactgtggatacagcacgtacagtacaatactaacgtacttcgaagtataaggtattagagtcccctgcgaatagagcgccctatgatgagggcatactataacaatagacaaatagccatttactagagcgccgttccgaatagactgctgacagaatgtacatacacgttgatattatacatgttgaatgcgttgggtaactacttaccgcgctcaactgcgatgccattctggcatgctgccgcaagacgacatcgtgccagttttatttttttttcaggaacacagacaatcaatcatacgactcgacatcaaaatgcaatcttatgagtggattgccagcgcaaaactggttaataatcgtaagtgtagagtagtaggagaacctgcgccccaattgcatgaccgaattcgatgggtttgcgtttcggccaccttgtttcgacagtggtgcagcagccgtgaccacgtcgtgtgggtggctgtcagcttttacggggtgactgtgaggatctggtcgtgaatgaatcgtatcctaaagtagaagattgcacatgaaagtgagaaaataatagcccgcctaaattacttatcagctttttcgatacgcgcgcggcacatcagcaagtataagatgtatgttgcattcacccccgtatgcgtgtaccgaataggagctcgtcgagaccacaacagtgctttcaacttgcttttgacgaggtttggatcaaagaataggtgctctgctagaagtacatgaaacatgcaaccacaacatgttttgacaacatactatcttcatagcagtagccatatcgaatagagtaccctaacaaatagtatgccatcaaatacaatgccctactcggctccagagggcactctacaagaatagtacgccgcatactaatttagtgtggggtgttttgctgttagtagaatttactacagtagacactaactcactgttagctgtatgtttgctgactgtcaggggaatagttgttcgatatattgcggttaaagttgaggtaaagtgaacatgcttggccaatctcttcttttacattctatgctaaaaagtgcagctaagcagtaaaagctattcaaatatcgaagttctgattaatatccgctcgtcttgctcgaaaattgcaattccatgttagcaaaatttactagacactaactaactgttattataatgacacgtacagctaactctactgttagtgtatagggagaacactatacaatcccccaagttgagttccgccatctcctatatataaaaaaatcgaagtcaacaaaataggcttgggccaaaatatgctccactgggtttgagcattggaaaatctgctggcaattggtcaggaagatgcctgtccagtgcgtctgatcggcgctcaatcaacaactcgacggagctgcccagcagccggataacctcggaaatcgcctcaagctcgaggttcgtttgcttcaacgtgcgcggtgccaatatctcagacactccgcatgaactcctttgtctaacagcaaataaagtaccctatccggctccagacttcgaaagatctccgctattaccgctaatattaagcagtgtggcgtcgtaggacaccgccgatggacaacctctcaccttcccatgctacatgtacacagtcacacccttgctcgcttgtgtcggtcctagctcccggttgagcgtgtgtgtgaatatcctcctccacggcaacagtgaaaccgatgcatggtcgctgaaatcctttgctatccgcatgaatgatcccatcaacgccagtaaagtgccatgcagtgagggtgcgcccctcttcactttctcatcactctccaattcgcgactcaagcaccagcctaccagtagtacccaccaccacccgtccagcgtccatggtcaagctcacggtcaccatcgccgcggcggtgggtgcggctgcagttatcgtcgaagggtcctccgacccgggatctccgctcagccctcactcgcaatttttgcgcgacgggagatcgaccagtagtggcacgggacttggtccttcagacagcgacgccgacgaacctcccccgaacgattttagccgcgacttggagcaacccgagcgtggcggcatgtttcgcggtgggcagcaccatcgctcgcccccggttgcaggaggtgccgacttttctctcaatgcgagcgacgaaggaggtagaccatggcacggtagcagaagttttgatggtcgtttcgacaatcctccaccgcatgccggggacggtgaaatgccacccttttcgaaccatgggccatttcgtaagggccacccgaagcaatttggcgacaagaaactcggcaatcgcaatcctcctcctccaccttctgctgacggcaaaagcactcgtgatcatttcgccaacaaccacccgggcatggagattcgggcgatccctttgctgcggacaggggaaaaggtggagtgccatctcagcagtgggtttggttcatggcctggtagtggaagtgatgccggagaagctccaccaccgtcagacgtaggcgacgatcttgcccctccgttcccctggcaggatggtgctcccctcaacttcccgacgcctcctaggcagggcagtggcgaggcttcaaagctccacactcctaaaggaaagcagcctccattccctccccccccccaagggtgtcatgcgtggtggggacggcaaatttccgggccacttgcgcccaagccgtgatggtttccgtcctcctcccccaactatgggcagtaaggaaaaacctatcgccaccaaccacgagtacgaccccgacggagaagataccaacaagtctggtgaacgcaacctaccgccgccaccaaagttgggaagtgggtcttcaacatgactcggatgctgggaacacttcagccccgcccaccacgggtaatcttcagtagaaacactgctgatccgatccaattgctccctcgctggcgacgataacaccaagatcctcacgtaggaaccagcatctgcctaacttccattatttttcaaaccattcaccaatgcaaaactcgttcaaagcttcctcaatgtcttgttgttcaagtaaacagggatagttgttgagatactcaaccattcagcaactccgcggcccatagtctgtcgacacggaggcgttgttctaccaaagcactttgtaggcatactcgtcgtaaagagggtgaaacttgcacagcccctcctcgtgaaacttcgggaaatcgtacagccagcagcagtgcggaactccaggagctgtgtagcggaacaacgcccctctttcatccagcgagcgcaagccgtatgtgtcttccttgtactcgactgtgtcgtgcatttccactctcaaacttcgtctcaagctcttcaagcgacccaacctcgctgtagtgtccgagcagactgccttgccatggcgacgccacgccatcttccggagaggcgaagtaatgagcctccttcagtctcagaaaattgtttttgcgacgaatcttctccaagtggcagtggaaatcaaaccacgcgcagatattcacgttgttgatcatgggtaggaactcgttagtcgccagcagacgtcactcactggagttcggcccaagttcgtgatggagtaggcagcctgaagcttggggtccatcgatcgacgagccaagtcggcctgcatcttccctctgtagccctcgggtgtgtaccccgtaaagtcaaacagattttgcggcaggacggctgcgccaaagcccgctcctaagtcgtggatcgagttgcggtcggcttcttgagggccgtagaaatgccgttcacgcctcctgccaggctcacgtacgtgtgcaccttgtggtcgtccatctgctcgatcaccgcgcgagccatcatagctccttgggaatgcccgatgaagatgtagccatcggcgaagcgttgatcgctcgccaccacctcgcgcaccgcagcgatagccatcggcacttggatgttcaacgccgtcagagagcactccctctcacagaaagccaaccggacgaacacgcgccctgataatgcatcccaaatatgcgcccaaatcgccccaaatgtcccaaataatgaattgtctctgtaacatttaggtacatatttggggccaagtatatgactgctttctcgtaaaactatcccaaatatgtaccaaaacggagttgactgattatggtctatagtctatgggcgagggcgagtggacgcgagcgcgagcctcactcaatgcattcactaatcgccaacacccgccgattaggcgggggcgtgtctgtgcgagcgaacgcgagcgctgcaacccgatatttttttttctagacaccgcgcctggccgagacgaggaacttagcgtaagggacaagggggtggggcaggccgcgcagcggcgccccccgagcgaagcgagagaggggcgggccccccgcagacccgtcgctaagtccgcagacgagagccaacgcgcgagtgtccgccctgtgctgctctttcatactgaaggttattctgtcctaaatatgcaccaaaacgttcccatgcttaaatcatttgggaaactttgggatttggggcgttttcggggtgcattatccaatacccgcccttcagccgtcaagttcgcttggtagttgaaaccttccgtgctgttgcctgtgagccatggaagaagaagactggaaggtccttcttctcggaaacgtcggagccggttgcaagtgtgttggcgttgaggctcgtcgccacagacgggagggaagactcgtcgagacagacatcgttgccagacggcatgacgttggtgattggcgacgccgatgccaatagcggaagcagcaacaatgacagcgcacgcatcttggctagatatccgacctgaccttgacgcggagacttgaccaatgatgagtgcaccaggtccaactacagagggatgtgatcagagaccaagcagaaaactgaagttcaagtacctttgactgactattatccttcctgttcgcttactccttctgcgcgaggaacgcgtagtccgtgtatccgctctccagaggcacgtctggttgagggtagaaggtcttggggttctgcgcgttgagctccgcgccgacgcgtagacgctccacgaggtcggggttggcgatgaagtcgcgtccgaaggcgacgaggtctgccgctccttcctcgactgtcttgatggcatcctcacggtcgtagcccgcagccgtgaccagcacgcccttgtaggcgtcgcggaagtgacgagtgacgccgacttcgggcacctggacgttggctgcgtgcattcctcgacgctcgatgaggtgcacgtacgccaggtcgtagtcgttgagcttgtccacgacgtagccgtaggtctggctgggggacgagtctttgcagccgaaagtgtcgccgaaaggagacaaccggatgccaacttggctcgacggtagactggacagaatggcctccaccacctccaagatgatgtgcgcgcggttctcaatactgccgccgtatctatccgtgcgcttgttcatgccgtcacacaggaattgctccaagaagtatccattagctgcgtggatctcgactccatcaaaacctgcggcgatggcattctccgacgctttcttatagtcctcaacgatgctcgggatctcctcgatctccactgcgcgaggcgtgacgtagtccttgcgaccctcgcgcgtgacggcgtgcgacgtgagatcgtcgacgctcgtcgcgctcgacgacactggcagttgtccatccggttggttgagtgggtgaccaacgcgtcccgtgtgccagagctgcacgaagatcttgccccccttgtcgtgcacggccttggttaccagcttccagccgtccacttggtcttgtgtgaagaggccgggggcaccaaagtatccgcgagctgtagggctgatgttggtggcttcggcgatcagcagacctccatccgtggctcgttgcgcgtagtgctcggccactagagcggtggggacgccgctgtcaccagtacggaggcgtgtcaatggagccatgacgacgcgatgcttgagctcgacgggggatttcttgccgccaagaacgaacggtgtgaagagcttcgaggcgatagcggagaccatgacggcggctatgaggtggactttgtgttgaattggtgacttgctggttgagctgcaaattgaagaatgaggttagtggagacttacgcacgctgcccctcaccttctagaagcgaccaccctatagacggtgtagcgatgacggtgtcatagctgatttcgcatcatcagcttcgttgagcttacctgggctttgtggccaattaaatgaaaacgtacgaaattgctgatgatattgtaagatttggtattggacacctggagatacagaccgttcacgttatcgaaggcgcgatgtaataatccatttctcgagcttagtaatcctcgaccatagctcgcatcattcctgctttacaatctaaaacaatgtactaagggtgtgttcctcagttccgctgtttgattccgtcggattgagcaatccgcctattgagaagcattcagcggattccgccatccgctaaaccggatgaggaacacgtccaccggcatccgctaccctccaaattgcactgtaaaattacattaaaccatgtgtattatgggatagagtgtatgcaattagaggttcaattagttgcctttactttgacctaagcttacgtcaagtcctccgccaagcccttgtttgccaaaaggcttcgagcactcggatcgttgccggactgcaatactcactgtcagcgtgcaccatatttaccgcgtgttgtgcgctgtctttgcccttcaccctcgtttgccggggcacttcccgtcgtcttctcctcctcgttgtacttactgagtgactagccccctgcagtagttgccttgcttgcttgctttgcccgcaagtttactgaatgcagtcagtcttccctgtacggcaaactgtaaggggctatgaaatcaaagtgccagatcagcagtgcatttttacagcataagctcagaacacatccttatcacaataagctgatgcaattgcgtgcgtaaagcgaaatcgttgggctacacttcctaacgacgagctgtcgtcaagacagcacgatagcaggtcagttggccactgctttggtgtaggggactcgatcttgctcgtgactcgtgagcaggactcgccaatactctgaatacagttgctacttccagtgacattacgacataatttactgacactaacaattcaaacgaaaggatgttggtatgcccatcagcgaaggaagttgggtatcatacaacaaactaacaaaatgtctttcatcagcaccacaaattgtgattcacaacgagcgaacgctccaaaatgtattgaggacgagtctgtgcgagtcaactactcactatccagctccaccgtgcccgtcaactttaaaccgtctgcggctacgtctactggtgcctacggtgcacgacgcgggatctggaaacagcgagatgcctccgagcgagggcaagcctcaatgactaacgataacgcagatcccttcacactacatttgcggatggtgcctaaacgcatctaaacgtaaaatgctgtataatagtgtaggaggtgcatgtagaagtttagtagctggccgcttgtcaagaggcctgtcgtacttgagatcgccgtcagactacttgctgtcggcgtggtccatgtccgccgtgtgctcgtcatcgtaatcgctttggtctcgtcgtcctcgatgaacttgctgtgctccttggtctctacttaccttttgctgttttgaacttacaatttgcagttttgaagttgaaaatgtgtatatatgatgatcaacacgacgttgaggacgttttgaacgagttttgcattgctgaatggtttgaaaaataatggaagttaggcagaacctggctcctacgtgaggatcttggtgttatcgtcgccagcgagggagcaattggatcggatcagcagtgtttctactgaagattacccgtggtgggcggggctgaagtgttcccagcatccgagtcatgttgaagacccacttcccaactttggtggcggcggtaggttgcgttcaccatatcttctccgtcggggtcgtactcgtggttggtggcgataggtttttccttactgcccatagttgggggaggaggacggaaaccatcacggcttgggcgcaagtggcccggaaatttgccgtccccaccacgcatgacacccttggggggggggagggaatggaggctgctttcctttaggagtgtggagctttgaagcctcgccactgccctgcctaggaggcgtcgggaagttgaggggagcaccatcctgccaggggaacggaggggcaagatcgtcgcctacgtctgacggtggtggagcttctccggcatcacttccactaccaggccatgaaccaaacccactgctgagatggcactccaccttttcccctgtccgcagcaaagggatcgcccgaatctccatgcccgggtggttgttggcgaaatgatcacgagtgcttttgccgtcagcagaaggtggaggaggaggattgcgattgccgagtttcttgtcgccaaattgcttcgggtggcccttacgaaatggcccatggttcgaaaagggtggcatttcaccgtccccggcatgcggtggaggattgtcgaaacgaccatcaaaacttctgctaccgtgccatggtctacctccttcgtcgctcgcattgagagaaaagtcggcacctcctgcaaccgggggcgagcgatggtgctgcccaccgcgaaacatgccgccacgctcgggttgctccaagtcgcggctaaaatcgttcgggggaggttcgtcggcgtcgctgtctgaaggaccaagtcccgtgccactactggtcgatctcccgtcgcgcaaaaattgcgagtgagggctgagcggagatcccgggtcggaggacccttcgacgataactgcagccgcacccaccgccgcggcgatggtgaccgtgagcttgaccatggacgctggacgggtggtggtgggtactactggtaggctggtgcttgagtcacgaattggagagtgatgagaaagtgaagaggtggcgcaccgtcactacatggtactttactagcgtggggcgttgatgggattattcattcggatagcgaaacattcaacgaccatcgcatcggcttcgctgttacagtgaatgatatacacaatagctcgaacggagagctagggcccactagggtgtggctatggtggtcagcggtgtcctacggcaactcgcttcttataaaaccggaagtctcggtattcatgggtctaatctgatccgacgagcttcatactgtagctgtaggcaccgcgcacgttgaagcataacacacctcgtacctgagacggtttctgaagttatcagaccgcttgggtctcaagttgttgtcgatcgagcgtcgatcgagcgtctggccaggcaaagaaagcctttgggccagacttgaacgtgtgtacgacaccctggatccgagtgttgctgctgtgggtcatggccaaaaagcgcaaaccgcaactgctttgttagacgtgcgggcctccgtttgttgcgttgtctggtaagtaatagctgcggaatgcaccatggatgctctagcgtattattagccggcaacgccgaattcccccttgttgctcgtcatggcgagtcgagtcgtcacgctcgtcacctccggcagatggctctgagacgtggatcttcgcgaacacaacgcagcatacacgattaataattaagccctgtagtgccctgaatccttagcttagagctcgacgctcgcaatctccgcctccacccgagagcagcggaaaccgcaaccagtccgttcagcatagaaagcggtgccaaaggcccaagttgacactggtgaacaaccggtccagttagcgttgctgttcaacgccaagctcgaaggacacgaaggatgcccggctcactgcgcaacgcacatatccatacaccgtacagcgagatggcttccggtcggtttcggctccaactgcaccgaaagccgatatcggagccggcacccttgaccgacagctcgcctcaaagcgcggcggtgttcgacagcgacagccgcggatcgcgatagtggagtggcggggcccgcgtactaagcctcgtggtgcgtggcgggtccgttacagcccgtccttcgcgtcagtcgtggcgccatggtttcagcgccatcggtcccatgcgccatcggtcccatgcgtgtcaagaccgtgtggatcgatccacctgcacgccgatcgccgcggatagccctctcagctgaacatgaaatggctcactcgggtcaattgattttcctgctgctcaaaattcgtcactgcatatccgtgcgtggtgcactgcagcactgccagccgatcggatcgctgcggatagcagggtatcgcagactcccatgatatcggcgggccgagtgcgaaggtgcgagcttttgccagtgtgtgtggccgagtgcgtccagcagcccccgcaccagtgcgtaacgagcttatcgcggcagatgccgtggctagagagaccatggtgtaggggagtagccatttgggttaactgcggagcccggatactgaggaagccatcaatcaatgctcaattttctcagaatccggccgattttatggtctccgccaaccagctgcgcgcgagcccttttcggccaatcgacgcgcggcgcaaaccacacagtgtcggcgagagctgttgagccccacagccgcgcgcaaggagcggtgagctcgcctgcttcacgcagtggacacgcatgaactcccgccaaaggcgccttgggctgcagggtgcttggggcgcagatggagggcggaaaaccgaagcgcggtggcttgtctcgcgtgtgcgccgcgttcattggcggaaaatgcgtcgtgggcccgtcactggccgcgcgcgctgaatatttgcgcggccgtttccatactggaaccaagtcactgggcccctaatcaccgccagtctccctctttcgcacgcaacaaccaggcagctcgctccgtcgcggagcgctcgggtcacaacgggaaacctccagcgaagcgaggaaggaaggcgaaggcaccgaggcaacttagtgtataaccccctgtcgctttaacaccacctaacctggctgcaccccgacccggactctcggcttaagtgaatcacagcggcggagaggtgcgaggacaaaggagtggagagaggcggtatctctaaccaacgcccccgaaactacggcaagcagcgaagtccgaaattaacacagggccccagtatggcgcagcgcggaccgtcgggtcacggcgagatggaccgccgccggcgcgcgagctccaactacttcgagctggacgccgaccggcgccgcaacaagtcggagcgcagcgagcgcttcagcaagcgcctggacacgatggacgtgatgcccgcaagcttcaagggcgcgacgctggacgacgaggcggccgtggactactgctgcgagttcctcaaggctaaattcggcttccaggaggggtcggtcagcaaccagcgcgagcacgtgctactgcttttggcaaacggcaaggcgcggtgtctgcccagcgacccggcggaccagcacctggtgcaactcgccaacaaactgttcagcaactaccgttcgtggtgcaaatttatccacacgaacccggtgacgtatacgggaaatggcatcccgaactctacaggttccggcaatttgcacatggacgtgatgctctacttcctgatttggggagaggccgccaatatccggcacatgccggaatgcgtgtgctacctgttccaccaaatgctgaccatggtgaacgccgacccgcagggccacgagcagcagcgcgagggctggtacctggaccaagtggtgcgccccatttggcgcgaggccagcaacatgaagcgccgcaacgcgctcaacaagccgctggagcacgtcaagatccgcaactacgacgacatcaacgaatacttctggaagcagcactgcctgagcatccccgtgtcgcaggtgggccaggagctcacgcagaaccacggcaagacgttctacgagcaccgcagcctcttcacaatggtgctcaactactaccgcatcttccagttcaacatcatgtttttggtgctgcttacggttctggcattcgccgtgacgatttctccggatggaggcaagagcggctgggtgcagttcggccgcatcggagacgtcgtggagccctacacgacccgggacttgaagatcgccgtggtcggcatccccttcagtctcagtctgatggcgttcctcaagtgtgtgctggaggtgtgtcacggatggcacttgctgatctccaaggagagctcggcgacgagttccaggtcgttcacgtacgggtcggccctggcgactcgtatcatctggaacggaggctttgccgtgctctttggcatcatgatctacgtgccgatgaacgaggacaaggatactacgcttttggacaatttgtacccgctctgcggcgcgtacatcctgccggggctgttggtgctgctgacgcaggcgtttgccccccagatgatcaacggaacgtttgcggccaagtttgtgcgtgagggcgagagctgctacgtcggtcaggacatgacgcccccgttctcgtaccaggtcaagtacattatcttctggatcttgctgtggatcctgaaggccatcacgtcgtactttatcctggtgcgtccgctgatgctgccgacgctgagcatttacgccatgaagctggactaccagaactcgctggtgtcgttccacaacattggtatcattattgctctgtggctgcctgtggtgttcatcttcaactacgccacgcagatctacttcacgatcttccaggcgttgctcggcggattccagggcattctcatgaagacgggcgagatccgcggcgccaaggagatgaccaaggccttccgcgtcgccccgcagttgttcgaccagaaggtggtgacgcttctcgctcgctctagtgatgcgacggctagcggcacggactccacgcgcgccagcgccattgctgccgcctacgaatcgcaaatgatgctgcgcttcgtcgtggtctggaatgagatcgtcaactcattccgcgagggtgatctgctggacgacaaggaggcggctattctccagtacgacatccgcagcaccggcgaggtgttcgagcctgtattcctgtcagccggcaagctgacggaggccatgaacctcgcgatcaagatggccaaggacggaaagggcgagtcgcagctgcgcgtggcgctcgtagaaaacgactgcctctcggctatccgctcgttcttcacggccagcatgtatgtcgtgggcgctctgttcggcaacgacgacgccgatgtgatcgacggcttccgtcagatcgaggagatcgccgcgagcggtggtttcctgaagtcgttcaacgtgcgtgagctggccagccttcgcgtggccgccgtggacctgctcgaagagatcctggacctgccggacccggacgctcagtctcagcacatccccgacgcgcgcgtgcactcgatgggcgtgattcgcaacttcgtgtccaagatggaggcgttcctcaacggcgtgcagtcgttctgcgtggaccctgctcttcagcgcagattcggcaactccaagttctgctccagcgccaacggatacatgtacgcgtcgcgcggactggtgaacctgttctgcagtgacacggctatgggcgccgctacgcgtgcgtgtctgctgctgtccctggaccgatcggaggccatgcctcgcacgaccgaggcccagcgtcgtctcggtttcttcatgaagtcgcttgtcatggacatcccgcagctgcgttccatcaaggagatgcgcagtttctcggtcgtgactccgttctacgccgagaccgtgctgttctcgcttgaggacctgaacaacccgctcgtgaaccacccgatcttccagcaggtcgaggaggacggcaagaacctgacgatcctcaagtacctgacgaagattcaccaggaggaatgggacaacttcctcgagcgcgttgacgtgagctcggcggaggaggcccagaagaaccaccccgaggagatccgtctgtgggcgtcgtaccgtggtcagaccctggcgcgtaccgtgcagggcatgatgatgtacgaggatgcgatcaagattctgcactggctggagatcggctcgagccccggcaagtctgcggagcagaagcagtcgcagctgcaggacatggttcgtctgaaattctcgtacatttgcgcctgtcaggtgtacggcaagcaccgcgcggagggcaaggcgcaggctgcggacattgactacctgctgcgcgagtatccgaacctgcgtgtggcgtacgttgacacggtggtgcacgaggatggcgagaagtcgttcgacactgtgctgattaagagtgagaacgacgatattgtggaagtgtaccgttactctctgcctggcgacccgatcctcggtgaaggtaagcccgagaaccagaacaacgccatccccttcacgcgcggcgagttcgtccagacgatcgatatgaaccagcagcactactttgaggagtgtctgaagatgccgcagcttctgtgcacggccgacctgcacccgtcgaagaagcccgtgtcgatcatcggtatgcgtgagcacattttcacgggtaacgccagttctctcgccaagttcaagacgtggcaggaactggtgttcgtgacgctgtcgcagcgtgtcctggccgagccgctgtacgtgcgtatgcactacggtcacccggatgtgttcgacaaggtgctggcgatcacgcgcggtggtgtgtcgaaggccagtaagggcatcaacctgtcggaggatgtgttcgctggtttcaatacgacgctgcgcggcggcgtcgtgacccacgtggagttcatgcagtgtggtaagggtcgtgatgtggctctgtcgcagatctcgatgtttgagggcaagctggccaacggtgccggtgagacttcgctggctcgtgaggcgcatcgcatgggccagttcatggatttcttccgtctgaactcgatgtactactcgcacacgggcttctactacgcgacgtggatgacgattgtcacgacgttcgtgtacatgtactgcaaggtctacatcgccctgtccggcgtgcagacgcagattgtgtacaacatgaacacgacggagatcatcatggacaactcggagacctacggcttcgacgaccgcgtgtaccacgacatggactcggtgtacaacacgcagtattacatccaggctggtctgttcctgtcgctgccgctgatttgtgtgtacttcgctgaaatgggtctgcgtcgcggtctggtgcagttcttggagatggtgttcacggctggcccagcgttcttcatcttccagctgggtacgaccatgcactttttcgacaacaaccttctgcacggtgaggctcagtacaaggctacgggtcgtggcttcaagatcactcgtgagacgttcgtgctgctgtacaaggcttacgccctgagtcactaccgcaaggccatggagctcatcggtctgtgtttggtgtacctgacgttcggcaagttcgacatctgtgacacctctgttgctggtgaggagaactcgttcgcgtttgactactgtgagacgtcgcagagctttggtgtgcagacgttcgctatttgggttattgctatcgtgtggctggtgtctccatacattttcaacacggacggacttgactgggagaagaccaaggccgatgtgacggcctgggccaagtggatgtacgccgctgaggactacaaggacgaggacaaggtcatggtcggtggatggatcgcgtggtggaagggcgagctcagcttgtaccataacacgaagcccgtcgcccgattcacggtcattctgcgtgaagctcgccacttcctgctcatgtggtacgtggtggcgctcgagtgggaaatcctctcggttggcctggtgttcggtgctgctgtggtcacggtgctcgctatgggcctcttcggtgccgcgggcagctgcttccgcaacgtgaactcatcgatccgtgctgtcatgtacctgttcgtggtactggtggcccttattgtgttctttgtggccactatcgtgatctcggacgtcagcttcacccgtaccctctcgctgttcttcggctacatggcggctctgtacggcatcaacgagatggctcgcatgtacagctttgccaactcgtcgatcgcgtccgtgggcatgttccagcagctggccttcttcttcgacttcatcttctcggtggctatgatcgtgccgctcctcgtgatgtctgcgatcccgttcctgaacattattcagacgcgtatgatgtacaacaagggcttctcggaagtcgtgtcggcctcgtctcagtacgccttctcgctcgcggccttcatgggcatgttgggcggtattggctgcggctggctgttccacctcttcactacgattgagagcactgctggcttcctgagttacgtcacgacctacgacctgctcgacggcaaggtcggcgacggcgcggttacctacgcgttctacttcgcctgcatcgtgggcgtgttcgtgtctggcttcctgagctacttcatcggccgtcgtctttctatcgtcttcggtggcctgctgactgtcctgggtatgctcggcgtgagtgctgtccagagcggcggtgaaggcttcctgatgcctggtatttgtctgctcggtggctctgtcggtgtgcttctgcctacgctggccgtgtacatctacgagatctccactcgtgacatgcgcggcaaggccctgctgcttcttggcagtggcttcattcttggcgtcctgttcgcctcgtggttctcttcgtcgtcgaacgaggttggctgggtgtggcaggtgttcatcgcgaccatcatcctgtcgatcatgactccggcggtgtacatcttcccggagagcccgtactgggtgtacatgcgcgagggtctggaatcgtgcgagcgttgtctggctgtgctgcgtcgaaaggagggcgtgtcggaggagctgcgcatgatccgcgacgaagaggctggcagtgacgactcgagcgccaacggcggcacttcgttcctcaagttcgtgatgggtctgttcctgatgctggtctcgggtatcttcctgggctgcgtcaacatgtacctgtcggacacgttccgcagcatcgaggacgcgacctacatgttcgtgaactgcacgggtctgcagttcctgggcgcgctcttctcgttcttcttcatggaccgcatcgaccacaagcgcatcctgttctgcacgctgctgccgatggccggtctggtgttcgtgctcggcctgaacaacaagtcggagttcgtgacgggcgacagcgaatacctgatgctgcagatcgtgggtctgctgctctacttcttcgccggcctgggcatcacgtcggtgccctgggtgtcgtgcgtcggtctgttcaccactaagcagcgcgcggtgtacgtgaccgtctacttcatggtcttcttcctgctgcccgtgtgctcgacgtacatccgctcgaacgactcgatgagcggcgacgagtacttctacctcttcgccctgaccggctgctgcgtggtggcgatgggcctgctgttcacagtgggcacgcttaagaacggcatggtgtgcaccaagggcgagatggaggcggagcgcgcgcgcctgcgccgcatccgcgcgtctcggcgcagcgcccgcacgcctggcagcgcgcgctcaagaaacttcagccgctcgcgcgccaagtcgcactcgaactatcagatgtacgagtcgcccgctggcagcgcaccgtagagcggctaggccgtggcaagatgacggattgtactctagtcgagcaggagcgcgctcgctggctggcaagacaggcacgcaggcgtctcttgttttactttgcatcttgccttcttcatgatatcgttaatacgagaaaaagttttacatacacaacctcttacgcatacctagacccttgaaggagttgtagacatcaaggtcataagactttgaacacttggtcgtctccacgtccaagaagccacgtcggatgtgctttcgtatccacgcaaagcgtgcggtcgttcgatgtcttcaactaaccgacgggggaccatttcaacgtagcgcaaggaagtctcttcaacctccacttgagttcggtagtgagcagcaaagtaagagattcaacatggttcctcctgcactcgttcaaaacttacatgctttccatttcggcactaatttatccgtgctccctcttttgtcttgactgccgcgagcttgctttctgcgctgttaaattatgtactgtcgaccaacaactaaacctcccacacaaggcgggaaatgacgacgaaaccagaagacggccagcaaccccaacaccacgggggctgcctgtacagtcagtcatctctgggagtcctcccacttccaaccggtggtcttgggctctcgacgttccgtccgtctacacctcgacgtgtgtcttgcttgcactcgtagccttcatgcagctacggcgttcgtggcggtgggtcacgaatctgcgcccaccactgacacacttgagcgcattgaggtctctcgcccacctgtcgacgtcctgtgtgcgcccttgttcacacgctgcaccttcctcggtaagtcacaggtatccgagcgtttgcgtttgcacgtactcggtctgtttgtggggtcctgtaagcctccctcagaggcacagcataggattcaatcgctgttggccagctctgtccttcgcagctcctcgcgcacacgcacggcgtccgtctcaatgtcggtcggctcctccattcctgcggcgtcgttcagcgggtccgggatgatttctggcggctggccacagaagtgaacgcgcttgggctctccctgctgttcgtctgccgggtcgtccaggtacacgctgaggtctgctgtgctgccgctctggtccgacgaaccagaagcctgtgagttccctgactgtccacgcgagcgcttcctgacggggccgatgcccacgagtccaatgagctgaacgccatcggcactgcctcttcggtcgcactcgggaggcagcatgagcgcgtcctggtccggagcctgcggctgaaggtgaagctccggaacgttccccacgggagccatcgggaacatcgggggcaggctcctccgggaaggtgaaagctccaatctgtgcgtgatctgcgagttgagcatcgtgttctgctgtagacgcaattcatccgccggcagccccacgcggttgctgataatctccgcaatctgctcgcgcgagtcgaatgactgtaccaatggcaaatgcaacagcaacgttattaaactcacccgaccactttagcaccgacacaatcctgtcaactcaccttgaacgtgtatgtgcgtgaggagcccccaaacttgagcactgatccgtgcaccaccagggtcggctgcagcgcggtgagcctcaaaccatccacgaacgttccgtgagccgatccaaggtccaccaggtacgtggctcccttttcatgatgcacgatcgtagcatgcagccttgagatggagcaatggctcaatacaatatcacaaaccgcagcgttgcggccaatgaggtaaaacgccttctggtccacagtgtgctgcaaaaaaacaataaataataacattaggtctgatatcccatgcaacacttgcaattatcccccaacttcacgcaccgtggcaatgagcacgtgctccttgtacacgtccaggagtgaaatcgacctcgggggcttatgcatgcacctaaaatttagcagcacattgcgacaagttaaggtgagaaattaacttttccgttcagcagccacaaggggataacagggggggggggaattgcgcagccgtaccatgtcggcggcgggaacggcaccgtgggcgggtcgatggggtccaggaacttgggctgcaccgcgaacgtgggcaggtggagtctcggcagctgcagcgcctgctccattgtctctgagtctgctgcctgttgcctggaagctggagcgaacgaaagtccgtccgtcctcgatcgaagcgtgtcttgcgtcgctaggagaatcgcccagtggctggagcgggcggggggaaacggaaaccgagagcgagcggtctctccacgacgacgcgacgttcgttcgttgcctgcctgccttctctctctctcgtgcgagtcgcgcgcaacaagcggacgagcgtctagcttgggagtctggagttgctgctgttgtgagtccctcagtgcaggctggcaccacgaccggacactgcggtggcccggctctgcgccgggcagagggggcaacgacgtgacgtaattggtccaaacgcatcgagtcagaccaacgtccccccctgaactctatgcggttcaggaggtcttcccgcgatggagctgctattttcagcgccaggagacagccatgccggaagagaggttgaacgtttcggccaatagcagacgcgccttttcccgccaatcgtcgtcggaaggctgaagctgcggatcacgaggagctccgcaacggaagtgtacgtgtacgtgtgcgtctacgagtcgcccgccccatggaggagtacgttgctgtcgtcgttgcgcggttgttgccgccgccgtcgcgcggtcgcggatgagtggaagggtctgatcgtttcgctgcgtgtcttgtaggacgcacgccgcgcgccagcggcaggacgagcaggtgaaggcgcgtatcagcgagtggctggtgcagagcggcgagaaggagcggctcaagcagctgctgcgcctcaagctggtcgagtgcggctggcgcgatgagatgaagctgcactgcaaaggtgctgcttggagtgtactgtagtaattggattgctaccttgttggggtggggtggactgtgagtgagctgagaccgtggcgattgactgattgccaacccgtagaggtgatccggaataagggcatcgaccaagtgaccgtggaggatctgatcgaggagattactccgaaaggaagaggtgaaatggaggctgtgtactctggtgttgagcggaggataggacggcgtggcttaatggccgtggtgttggttgcgttgcattgcattgctagcgtcggtgcctgaggacgtaaagaacgacctgctggagaagatcaaggcgttcatcgagaaggaggcgggcgacgtcaagttggacgccagcacgtgaagcgaagcggatgccaagcagtttgaagccatagagcagacacgaactaaattcgcagccgccggcactcacgcgcgctgcggatggctgccaaggcggcgcgcgatacagcaggcaggaaaatccagcggagacccattgacaactagcgtaccacatgggattgctgtctgcttgccgccgctgtggacgctttctttcgcgctcacgtggacgtctaatcccgaaagttacaaaatccaaattgaatatttgcggttacaatttaattatttgctttagtagtgacggatgtcactaatccgaaacggcatcgtgcggcccgaagccactcacttcgcagagcagagctcggacgatcatggtggtgagactgcgcctggcccgctggggccgcaaggacctgcccttctaccgcatcgtggccgcggacgcgcgcgccccgcgcgacggcaagcacctcgagatcgtacgtgtgttgccgtagccaatttcccgtaaccgctggttagcactagcctaaacgcctctaacctcttgcaactttttgccatttgttgcagctcggcacgttcaaccccatcgccgccagcgacggcgtcaaggagctgcgtgtgaacagccagcgcgtgcgctactggatgtcggtgggcgcgcagccctcggaccgcgtggcgcacctcctgggcctggccaacgtgctgcccatgccgcccacccgccagtacatcaagaagagcgtgcccaagaaggaccgcgagtagacagaacgccgaggagcaaatggcagagagggagatgggcagcagtagatggctacacggagagatacatgtattttcacataaagtctctttgtgtctaaccttgtatttgcatttgcagcttctcagtgttatggtgttggtgacaggagatcttgtcgtggtcgcagcaatacgagaagttgaggggcagttctcatgcagcagttgaaggcaatccactttctccatctgagggtagtggagcaattgttgtggctcgcccacctgcaagccttggcgggattgatacccggtgtgcacttgccatgggtcgatcgtacaaatgaagctcgtggcactcactactcttcgcgctctagaatcgtttggtcgagccttggacatttcaatcggaagaaatggcacaacgatcaagttgaggctctcaaggagatcatggtgctcttcgagcagtagcgtgcacccccgccggtattataatatggctcgagtccaatacgctttcagcgcccgcgcgcaacgggctcattcacggctcaagttcgtccgatattcacgtaatgaacgaggataacccgagtcaaacggtatttgttttcaagttatcttacgcagacgaagccagctgcagcagcgaaaggtaagaagctcacgcctggacgttatgcagctccacgtgcatcctgagcgcgaggtctctctgggctcggttctccttgaggctcagccacaagttgaacaggatcgcgagctcctccttctcgagcgggctgttgagatttcccctcgagtagaggtgcaggagtcgggcctggacgatcgcgaagcattggtcggcggtaggcttgagcctcggttgctggggaggctgagtcggacctggagcagccatgggctgctgcggagagaccggcactgcctccgcttgctccatcttctgcggcgtagcctgctgtcccttggccatggcgtctgcgccctccacggcaaattcgatagtgaggcatgagtgccgccgcgagtagcgtcgtcaagcagctacagaatggatacacctaatgttgaagttgaagtgacaagttaatgacaaaaggcaacttctattggagtggggtagtagcggaaaactaatgcaatagctggtagagcgtggtaaagcgagcctacttccggggcgtgcgcgcccgcggcgccggcccgcgcgcggagcctccgcccttgagcatgttgccgcccttgcgcacttgctggttgaacgtggcgttctgctcctcgagccagcggcggatctccttctgcttctcctccttggccgcgaggcgcgcctcctcctccttctgcttctcgcggtggatgaactcggcgtcgcgacgcagctcgcgggccgcgcccttgcgcgcgcgcttgacttggcgctgcagctgcttgagctgcgcagtgtccttgggcgccgtcttgtccttgcggaccgtgtagttctcgtcgaagagcggcgcgaacgttggcagcgtcgtcggcgcgaagctctgcagacgtagcggacgacgcgcgttccagcacgagtcgagacgcttgtgcagcttggagatgacggcgttcacctccgagatcttgatgtcctccagctgagtcaccagcgcgtgcagcagcaggtactgagggtagaacagctcatcgaacgacggcagcgacgcgtactgcgccgacgtggcgtccagcagagccagcagcgagctcaacacttgagcgccgctgcaagacgagctgccagccagcgacagacgcggcagagcgggcatcttcttctcctcagagtgtgcagccacccattcgagcaaatcacgacgcagccagtggaccgaggactcgctgtcgtcttcgtcgtcggcttccttcgtctcactagcacccgacgtcacgaacgcgcggaggatgcgagtgaggaaggtcacgacctccggcataaagcgctccttcgaccgcgtcatgtccagtgacagcgaggcagcgaacagcgcctgagtggcctcctgcggggagctcacagcaccgcgagccagactctcgcccagaagcgtctccatgggagacaccacgttgtgccgcaagtcggaggtcgggaagatggacgtaagcaccttaaaaagaagcagctccggtagcgacggccacgccgaggtcgaagcgcgcttgcgcaaccgcttgaagagctgagcaagcagctcacgcaccacgacaccggcagtgtcacccatctgctgcgccagcgtgtacatgttcctcgccagcgagtcgagctgtaacaagcagtgtaaaaagttagcatcaagacatgcataaagctgctggcaagagtaaaacaacgtacgtcttccttgtgtgctgcgtagcgcgccgcgaagataaggaactggcgcaccatcaccgcgaagaagcgcttcatcttgttcttgttctcaacgctcaggcgcgggttgtagtacgtgacaatgcggtccaagatgagtccgcgcttctcgggcgagttgcgcgcgtgctccttgaagagcgccgcgagctcctcaggggactccgggcactcgaacacgaagggcagctcggcggcagcatcctcagcatcctgcttccgcttctgcttctcagtctcctcgtcgctctcttcttcgtcctcctcctcttcgtcttccttctcttccttgtccttcttctcctcaacctcgtcttcgtcgtccgaatccgcttccgagtcggcctccgagtcctcctcctcgctctcctcctgttcctcctcatcctcgtcaccctcctcagcatccacgtcggcctcttcctcctccgcgtcagcattgaagcgcgagtccacagcatagccgtccgtcaggtcgtcatccgttggcggcatgatgataagcttgggtcccttgtccttcttccccttcttgcccttcttgcccttgcgcttgccctcgtcctcactgtcgctgtcatcgtcgtcagcgccgtgcatacgcgccacacgcttcttctccagggccgcaagacggtcgcgctccttggccgcagcctcctcgggcgacatcctgcgctccgtggccttggccttggcttcgaaggcgaactccctcgtcagcttgtcgaagtcgtccatcggctccttcggcagcagctccttgccgttggcgcgcgtgggccggaactcgagcagtccgcgcaggtcggcgaagccctcgtcgagcttgtccgtctcgtcctcctgcgccgtcttgttcttctggcgctcggccttgaacatcttggccttcatcatgacctcctgcatgacctccttgtgggtcttcctcttgccgtcctctgcctccggcgcggaggcgtcggcgtcgcccttgccgccgccgaagtgcagcttgttgacgatgtccctgtccatcttcctgctctcctccgagtcgtcctcctcgtccagcggtccgtccgcgttcaggcggtcgtagtcgtcgtccgtgatcttggcgcctttgtgcgtcaggaacagcgcgtcgtcgtcgccctcctgctccgagtccgagtcgtgcagcgcgaaggccgcggcgttgcgcagcttgcgcttgcgctccgtttggaagcgcgccatcatcttgtcctccatggacagcgtcgggtcctgctcgccgagccgccggtccttgaacacgttgctcttgttgcgcgccttgaactcggcgcccagcgtcttgcggcgcttgcgctcggcctcggcgcgcgcggccgccacgttgcggcccgcgcccttgacgcgccggcccagcacctcgtgcttctgcttgctggcgttgccgcgcacgtcgaacgggttggcgccgcgcgagctgctggcgcgcacgaagccgtgcttctgcttcttggcaccaccgcccgcggccgccttcttgccgccgcccttcttcttgaacgccatggtgggaggaggagatgcagagacgcacagacactactagcaatgggccctgcaggtcgaagtgctggttgagtgatgtggtggccaaccgttgtgcgactcacagggatagggatatctaactaagggtggatagttttcggtggaaacttagtggtgtaaatcggccgagtgtcgagttttcgcgatacgtagtggtgtaattcgtgacaccttaccttcgttttcttagcggtgcagggactacagagctccgcgattagaagcgaagcgctgtaggacaccgctgagctgctcggtggacaacctctcgccttcccatgttacacaggcacacccttgctcgccggcgacggtccttgctctccgttgaacgtgtgtcaacggcaagagtgaaaccgatgcatggcggttgaaatcttcgctatccgaatcccgatcccatcaacgccccacacgagcaaaggtgtcatgtagcgagggtatgcccaagatgttggcgtccgttctcccataaccagctcatcacactacagtaactcgcccgtccagcgtccatggtcaagctcacggtcactatcgccgcggcggtggctgcggctgcagttatcgtcgaagggtcctccgacccgtgatctccgctcagccctcactcgcaatttttgcgcgacgggagatcgaccagtagtggcacgggacttggtccttcagacagcgacgccgacgaacctcccccgaacgattttagccgcgacttggagcaacccgagcgtggcggcatgtttcgcggtgggcagcaccatcgcttgcccccggttgcaggacgtgccgacttttctctcaatgcgagcgacgaaggaggtagaccatggcacggtagcggaagttttgatggtcgtttcgacaatcctccaccgcatgccggggacggtgaaatgccacccttttcgaaccatgggccatttcgtaaggaccacccgaagcactttgacgacaagaaacccagcaatcgcaatcctcttcctcctccaccttctgctgacggcaaaaggtttcgtgatcatgccaccaatttgctacggacaagggaaaaggtggagtgccatctcagcagtgggtttggttcatggcctggtagtgcaagtgatgccggaggcgttccaccaccgtcagacgtaggcgacgtcttcgcccctccgttcccctggcaggattgtgctcccatcaacttccggcgcctcctaagcaaggtaacggcgaggcttcaaagctccaaattcctaaaggaaagcagcctccatttcctgccaagggtgtcatgtctggtggggacagccatttttcggacgactgccgcccagcccggatgggttccgtcctcctcctccacatctaggcagcaacggaaaacctaccacccgaagcactttgacgacaagaaacccagcaatcgcaatcctcttcctcctccaccttctgctgacggcaaaaggtttcgtgatcatgccaccaatttgctacggacaagggaaaaggtggagtgccatctcagcagtgggtttggttcatggcctggtagtgcaagtgatgccggaggcgttccaccaccgtcagacgtaggcgacgtcttcgcccctccgttcccctggcaggattgtgctcccatcaacttccggcgcctcctaagcaaggtaacggcgaggcttcaaagctccaaattcctaaaggaaagcagcctccatttcctgccaagggtgtcatgtctggtggggacagccatttttcggacgactgccgcccagcccggatgggttccgtcctcctcctccacatctaggcagcaacggaaaacctaccgccgtcaaccacgagtacgaccccaacgctgaagacaccgtgtcttagacacgcagtgtctactagtgattgttcaggctaggcgaggccgcaccgtacatgtcgaatcatgccgtgaaagccatttcgcgaccgtgaccaagatcttcacgaactaaccttttcgtctttgtcgatactaacatttttcaagccgtagcaaagtaacattcgtacggaaaaatcgtatattgttaggtcgtcgcaagtgatacaatggctatccccatagagtgagcagaaatactcggtagctgtgctaccagcaaccccgcgacgctgccaatgaaaagtgccgccctaccgaagcaccttgtacacgtactcgtcaaaaacaggatggaacttacacaagccctcctcgtgaaacttgggggtgtcatacaaccaacagcagtgcggaaccccggggaccgggtagcggaacaacgctcccctttcatccagcgtgcgcaagccgtacgtgtcgtccttgtactcgactgtatcacgcatctctacgatcgtgaggctctcgaacctagtctcaagttcttccagtgtctcaacctcgctgtagtgttcaagcagacccatttgccatggtgacgccgcgccatcgtccggagaagcgaagaaatgcgcctccttcagtctcagaaagttgtttttgcggcgaatcttctccaagtggcagtggaaatcaaaccacgcgcaaatattcacgttgttgatcatgggtaggaactcgttagtcgccagccagacgtcacgcactggaattcgtcctaagttcgtgtaggagtaggtggcctggagcttggggtccatacatcgacgtgcaaagtcggcttgcatcttccctctgtagccctcgggtgtgtaccccgtaaagtcaaacagattttgcggcaggacggctgcgccaaagcccgctcctaagtcgtggatcgagttgcggtcggcctcttgagggccgtagaaaatgccgttcactcctcctgccaggctcacgtacgtgtgcaccttgtggtcgtccatctgctcgatcaccgcgcgagctatcatcgctccttgggaacgcccgatgaagatgtagatatcggcgaagcgttgatcgcttgccaccacctcgtgcaccgcagcgataaccatcggcacttgggtgttcaacgccgtcagagagcactccctctcacagaaagccaagggaacacgcgcccttcagccgtcaagttcgcttgcaagttggaaccttccccgctgttgcccgtgagcccgtggaagaagaagaccgggagatccttcttctcggagacgtcggagccggtggcaggtgcattagcgttgaggttcgccgccacagaccggatggaggactcgtcgagacagacatcgttcccaggcggagagaggtcgatggctggcgacgccgtcgccaatagagggagcaacagcaactgtagcagcacactcatcttaacggttgacttgtgcttgaagcggagacttggtaaatgatgagtgaacgaggtcgagctcctgatgagagaccaagcagatacttaaatgaaagtagatacgcgggccatgtgcgaccgcgtcaaacatgcttacgaaccaattagatatcaaaggcaaacatgagccctggggcttaacaacccctatggttcatgcattcgggggcaggttggggcaactctaagcgggagttttacggttattgaaaacattattaaaatagtggtaaggacttattgggataagaagcggcgttagtgctggaatcacagcccttgccatcgaacaacattcgcgctatattcgttgctaccaccagcggataacactgcgtgacactcacgttatagccggtcctctactttaaaatagctgggattagctgggaatcttttgttttgtagtgtagtactcgttaaggctggatttcagtagtatgttgttttactttgaccaacggattcgcacttcctctcaagtgtgacggtgccagtgggaccgaagataagtaaccatcagctagtctcgttcatgtaggtcacagaatcgatgctacaaattcgggcgtctgcgtctggaatccctgtctgatttccagagatgatcatttttttgattccgtaagcgaagtggaatcggagtcggacgcttgtgacatatctcaccggtttactagtatctgtaatatgtatttcgaaactccaaatggttcgtaagcttcactaaatgatgattacgaacgtttgacgcggtctcacgtacatatattttcggtcttgtttacttacagtgatacactccttctgcaataaggaacgggcagtctgtatttccgttatttagaggcacgtctggttgagggtagcaggtttccaagttctgcgcgttgagctcctcgccgacccgtagatgctaagtcgcgtcagcaggcgtcaaggtcggccgcacctccccgaccgtcttgatgacactctcacagttgtaggctacaacttgtagccgcagccgtgaccagcacgaccttgtaggcgtcaccgaaatgacgacttcgggcacctggacgtagggtgcgtgcatcctgcggctcttaatgaaatgtgcgtacgccaaattgtagtcgttgaacttgtccgagacgtaaccttaggtctgactgaacgtcgagttcttgcagccgaaagtatcaaccggaatcggaaaaacccaatatccgtaaaaaaatgaatttgcagtgacttacggaaataactactgatacccgtcgtaagttgtatatatttttgcgtcagacttccaattcgtattgcacgaagttggtgcttgatctaaccgaggaatcaggagcagggactgacaaaaaaccggtgactttcactatgaatatctgactgaaatcgggctcaattgaaacggaacgtgtcttgctttatccaacctttgtaatactatcatctaaattacaagtgcacggaatctaatgtatgtactggtaatggtagggtacgtaatgggtagccgaggtaaactaaccattagatttgttctactaccacacagaatgacctcgaagatgacgcacgcaatgctgccgccgtacgttagtatgactttcagttcgctttggctgtggattctctagcgtaacattacacgacaatgtcaagcccactcagccgtccgaatctcgtgcggggagcactctagaaggtcgagctgaaagacatgcatacttgtgtattggcccaatatatttgagatttatggaactttagtaaaaatgttgtacttttctagaaaaagctgacagcttgtttgtgcggtagacacgttccaaatttacttgaagtttgtaaagtttgtgaggcataaaacaatcttcgagcaattgaagtcggaacgagcacccatgccccaggaagtgtcccgcttgctcgtcgtggagctgcttttccgtgccaagagcgccttcgtcgacctgtcacacgtcatcacctccgtctcgcagttcctggactcgtcggtcgagttgccgctgcacaaggcctgcgccttcgagtctctgcgactgctggagcgcatccgggtctccactcaagcctatcgcaagcaaaaacgcggcggcaacgactggtctcttcgcaaactcctcctatccgaccgcttctaccgccactaccagttcaaccagtcgctgcaggaggtagtgaagcgtaaagacttcaacttggtcaagtggctgtccgcccatttccagggcgttgccatcgtgccccaagtggcgaccacagccgccagtgtcggggccatggaaatcttgcagtttttccttgataacgacaattcttcgcataggaggcagctacaatcgacaaaccccaccaaacaaattgtcgtggggcatcgagttcaatggagcaaggacgccctagaggtggcggtgctacacggccataacaacgtcatgtggtggctattgcaacacaccccaagcgtgagatacgataagagcaaggcttttgagtacgctgtgaagaacggggacatcgccctggcagagtggctactgtctcatggtgccgccttgcggctgcagatccaagggcgccgtttagtgcacgaggttgcagctcaaggccgccttgatgtgctcaggtggctggagaaggaggaactggtttcgattagttgcggagtggtaatggtggcagcggagaatggacacttggatgtggtgcgctggctgctggatctgaatgccggaagaagtgacaaactggggggagaggccagtctggcaattcacaccgcggcggtgaacgggcttcttgacctcgccaagtaccttcgagcgcgcgcggaaacacctcgaaatgcttgccagtgtgcggtggaaagtgaggagcaggatgctctgattcgaactttgactacgcagcgtggtgaatcgtgcacggctgccaaggtctcgatcgatacgttgatcaaagccgggaagaatggccatgctggtgtcgtgaaatggctatcaacggagtattgttctgttatcgccgacggatatcagcagacaccgaccgatggagctctgatggatggtatcgctgcgcgagggcatctgaacgtgttagttctggtgcaggcgatggaatttaacgcggatagtcggaaacgcaacagaaatggatcgagcaggcccggtcgcaagtgcaccaataaggcgatagactgtgcggcggcaaatgggcatttggatgtcgccaagtggctctttcggaacaggctggagggctgcacaagtcgcgcgatggatggagctgcttcaggaggctttttgcgcgtggtgcaatggctgcatggagagttatcgatatggagtacaaaagctgcaatggacggcgctgctaccaacggacatcttgaggttgtgaaatggctgcacgccaatatgaacgctggctgcacgacacaagcactgaatggagcggcaacaaatgggcatcttcacgttgtgaagtggctgcataaatatcgccgtgaaggatgcaccgtcgcagcaatggacgaagcagcagcgaatggtcatttggcggttgtgaaatggctgcaccgaaaccgagcggaaggatgcaccacagcggcgatggaccaggcggcgctacaggggcatttcagtgttgttcaatggctccacactcatcgctcggaaggttgcacaagttctgccatcaacagtgctgccaatcgcgggaatttcgagctcctgctgtttttgcactcgcaatgcaagcaaccttgcacgacggaaactatggaattggcagctcgcaacaaggatacggggggttatgcctggattctcgaccgctatccccaatttcgtattcccccacaggtgtagcgtgatctatgaaaatgttttaagttcatgtacaggttcgcgtaatggttcgcgtaaatgtggaccgaattttgactttcgttaaaaggcaatggaaccgaccaacaagtgctttgcgtgcacgccctacgaaaagacgatcacggtgtatgtgttaaaaatattgaaaactaagcaaactaaacaaaactcagctaaactaatacgcaatcattcgccgagatggtggcagcccactatatacttcgtattcatacgtacttaattgattttttttatttttttaaacgcgtcgaaactggctttgaatatgccgctgcaacctaagactcacagaaaccattgattgcatggagagaccctgaaagtcagtgtgtagtagacgcgcgatgtatcatcgcggtgaccgagaaatacactttaccgccatggcagttccacctcaaccgtttaattgctcccctccaccacaggaccgccatctttggcgtcgttctggtcattaactagacgatgaattcgagtccccaccattgagtgcgcatattcgtcgctcagtaagccacgcagcaaatcgacagcagcaaccccatccgatacagcaataaacttgtaaagcttatcctcattttgtacgcgaagattgttgtagaccgattcctgaacgtactgtgacgcaaaaactatggactccttctggaagtgttcatcaacacaataatgcagcagatcacgcaagtcgtggtagtcatcagcgttaagcattgcacacgcatccaccaaagattctaaggtgacacaacgaatcgcacggtcgattcgaggttgacactcgcccgaccgatcaggttgcagcacttttcttgcgataccaccccaccgacggtaagagtcctccaccttgtcgacaggaattttgtcaacatatattgcttcatggcacctgagaagttctttcggtgtcacaatttttaaaacgagtgataagtgatatggtagcacttagagaggaagtacggcggcatcgggagccgagatgctgtgttgagtacgctggaaaatcgaaactgtgattgaggttagtaccttcgtcctattcctcctaagcaattctagtccttggtgcctgtaacttcaacatctaacttcaagcacatcgcttcctacatctttaacttcatccagatgactgcgttgcacgcgggtcacacagcttactgcagcttgatctccacaaagttggcagatcgttacccattttcgcgctctatgtgtttgtagtcgataatatcgtgacattcggccacacaggcatgtagaaaaatccgcaattcaatttgctgaattcgaaccagactgagcgccttggtggcgtcaaaagtatcgtcttgcatggataatagtgcgaacggccacggttcactatgcagtacgtcgttggccttcgtaaaatggcgataaagtcttggtccgatcccttagcgaccaagtcaggagagaacagaaaccgcctccccccaggccctgcacactcgaagacgactgtcgcccgaatccgagcaaggtgcagcagcacaacgaaaccgaaaaacgttttcccgacccccgaattgccgagaatcacaaggtgtggcgtacatttctcctcgtcatggattgccttcatacaagtgtccaacagcttcgggtagcagtcacgaatgaagagttttgagccaagtgaacgatccccaaggagataagttccttcgggtagtgtgacaatgttcccaccctccatgggggtggaatccctaccaaacgctctccaaaacgagacgagattcgggagattcacgtgcatggagtgtgtaacaaaacaaaccacacctccaacgacaacttgggactgttggttagaccacgacggcggcgataccacaacacacagcggatttatggggcccttcccacgattctttaacgtagcgaacgcattaagaggccggttctctccgtacgcgttgaaatcctcgtagactcgaagcttagcggcattaatatgtttgggaagagcagctccaaccttctggaaaattgcgtcctgaacgttctcaatgcttctctcttcgacgaggggaattgactggacggtagtgcccatgaatgcagcgtgcgtgacagcatccaccaactggaaccagaccttgggcacctctacaaccagcgggtcatgctcgctctctccatagggagacaacagttccccaaacttcaggtgctcatgcgttttgctcgtaaatactctcaggtcgtcgagagcgaggcctgacggaagcgatcccttgcgttcagcaagtaattctatgcagaaatcttcaatatccaaagcatcctcaggtaacactaggaaatttaccgacccagtgctggttccgctccctaactgataaaaggttttaatcggcattgtcgacttgtcgaattctcaaatgagaggaaaaagcctgtgcccaaacaattgaaagattgagatgagaagtctggcctaacccatccacactgtcgcatccaatcttcgagtctacgaacaactttaccacatatttgtagctccaaatccgatagttttgtcgtgatcctggtgtgtttttttctgcatgccgcccggcagaaatgttattgataagaatgtgtccctgaactatctagcttaccttttgacgagtgggtgtacccgcagcagtacatcatgattaagtttttgtttattttttggcagaggcgtagttagatttctttgacaccagcattttttccccgaactgcagtagacgataatttgtttgcttcatgacggcacagcagtcccgcgcaacagaccgcgcagcacatcatcaggcccaaaatcatccactacagcaagaaactcgagcagtttatccttgttctgcttgtaaaggcgcttgtagacctcctcctgaacgtaccgagaagcaaaacccaagcattccttctggaagcacttcgttacgcgataatgaagcaggttgtgtaaggcgtggtagtcatccgcgttcagccttcgacaggcagtaactaatgagttcaggttgacactcaccagtgcaatctggagctgcacctgatgcgaagttgacgtagcattgtgtagcacatagcgtgcgttgccgccccaccgacgatagcagtcttcctccttctcggccgacactttgccagaatacattaatgcatggcacttcatggtctcatctttcgaccacattggcatctacagaaactcacagccaaactttgtgaaatcgtaccaaagtgagcgccttggcggagacaataaaaccatcttgcatgggtagcaatttggagctgcaccatccacaatatagtacgttgtagactcatccaaaacgccaagaaagtcttgatctgacccctgaacaaccaggccaggagagaacagaaaccgctgcccagattctccacaaccgtaaacaacagtcgcgtgagctcgggtcagatgaaggagcaacaccaagccaaaaaaggttttgccaatccctgagttaccgaagatcacgaggcgtggacactcggcctcatcgcgagttagcttcatgcaagcgtccaatagttctgggtagcagtcacgaatgaatacctgggagcctagagtcggatccccaaggaggtaagctccatctgatagcgcaaccacgttgccatagccgatcgcagtggagtttctcgccattgcctgccaaaacgagaccatatccggaggattcacctgcattgatctagtaacaaaaatcattatatcaccgacacgaagttgcgtatacgggtcgggctgcattggcggcggtaccacaacacacagcgggttactggggtccttaccacgattatccaatgtagcgaacacctccagaggctgcttcgcttcgtacgcgctgaaatcctcgaagacgcgaagtttggcggcgatcatctcttttgggagagcgatggagaatttgatggaaacggtgtctcgtagactttctacgatgttttcttcggtgagaggggccgactgcgcagtggtgcccatgaatgcagcgtgcgtgacagcatccaccaactggaacagaccttgcccacgctctctccatagcgccccagtggtgcccccaactgtagacgttcgcttatcttactcggagatactttccggtcgtcggcaacaaggccaggcagaacaggttcgttgcgtacatgccgtaatttgttgcagaaatcttcagtatccgaagtaccattaggcgacccaaggtaacccaccggcatcgagacttgtcgccttctgcgcgaattctcaaatgatgaaatgaaaattctcgccagtcgctacgattgaaagattcaaactcataggcggtgaacccacagcattaccgatctacgctctatcaatcgctgttggacttgatggtaaagcaatgtatcatttctgtgaacgctaggataacattcgtaacatttactttttaattacgcgacgaagctggcttacaactgccgttgcttcttcaaacttacagatacttagacatggccaacgcagagcccacccaatcacaccatggacaccccatcgacgccgcacttagaagtctgcgtcgagcgtgaagacctgctcctcggccgcgacgccgacgccggccttcgagtactcgcccacacgcttctcgaagaagttggtcttgccctgcagcgagatcatgtccatccagtcgaaggggttcttgacgttgtagagcttgggcacgcccagcgagtacagcaggcggtcggccacgaactcgatgtactggcacatgagcgtcgagttcatgccgatgagctccacgggcagcgagtcgcacacgaactcgtgctcgatggtgacggcctcacgaacgatttcgtgcacgcggctctcgggcagtttgttgaccagcttggagtacatgaggcacgcgaagtccgtgtgcatgccctcgttgcggctgatgagctcgttggagaagctcaggccgggcatgaggccgcgcttcttgagccagaagatggagcagaaggagcccgagaagaagatgccttcaaccgcagcgaacgccagcagacgctccgggtacgacgacacccgcgggtcgcaccacttgagcgcccagtgcgccttcttcttgacgcacgggatcgtctcaatagcgcgcaacaggtggttcttctccatcgtatccttgatgtacgtgtcgatgagcagcgagtagacctcggcgtggatgttctcgatggcgatctggaagccgtagaagcagcgcgccttgggcacctgcacttcgttgctgaagttcatggccaggttctcgttcacgatgccgtcgctcgccgcgaagaaggccagcacgtgcttgatgaagaaccgctcgttgtccgtcagcttctgccagtcgttcaggtcgtgcaccaggtccaactcctcggccgtccagaacgaggcctcggccttcttgtacatctgccacacgtcgtgctcctggatcgggaacagcacgaaccggttcgggttcgacaccaagtacggctccggctgcagctcgccgttaacctccttgcgtttgtactcagacatctcgagcttcggctgctcttcctcctcctgggacttgttgtcgtgaatgacaattcctttggcgaagttgtccacgaactgcgggctcagctcctgctccggctgttccggcgacgcgaccaccgcggcgcgcacagtcgaggctgcgaccattgtagcgctgcctgcaaactcgagctcattcgccaacttgctcccttcgtctcattccccgtacagaagctcgcaatggtttacgtctccgcgacgtcctcactcctcaccatcgctgcgctagtcgccgtcgccaccagccccgtggaaggcgtggccttcaactgccccggcatcaactacaacatccgcgccggcgcggactgcggcccccgaggtcaagtgcaagtcggcctcgcagattgccagcgagcttgagatcctcaagagccacacgaacgtgctgcggctgtactcgctgaccgactgcgaccaggccactgcgctcgtgccagccgcgattgcagcgggctttcagcttgagctgggtctgtgggtggactcgtacgcctcgagctactcggccgaaaaggaggcctttgccacgctgctggacactggagtcgtcacgccgggcaacatcgtggggatccacgtcggcagcgaggcgctctatcgtggggatgtggactatcgcaccgccgtgggccacctcagcgagatccgccagatgtgcatcgacaatgggggtgcagccgaggtccctctcacgatcaccgacgtcggcaacacgtacttggcgtacccgagcctcatcgacaaggtcgacgcgccagcaagaagcgcgtggtgatcggagaccgggtgggccaccaacggcatggacgctagggccagcgtggccaccgcggagaacgcggccaggtacttccacgacttctatctgcaggcccaggagaagggcatcccgtactactacttctcggccttcgacgagccctggaaggggaccgacaccgtggaggcctacttcggcttgttccacgaggatggcaaactgaagtcgtccatcgaggggctggagctggacaacgagaccgccgagacgtctgaagcaggctcgaccgaagcggagccgtcgctagcagcagtagcagcactgccagcagcaacgcgacgggcgcgtccggatcggcagccgaggaggtaccgtttgcgagagcaagactgacgaacccgagtccaccgtggcgcccgagtccaccgtagctcccgtgtctaccgtggcgcccgtgacgttcgattccgcaagtggcgtcgcggagacttcgtccagcgatgcggggacttcatccgagggagctgacacgacgacggtcgcagttggagcgagccaggtcgcgtctaacgacggcagcagcagcagcagcttgatccccaccaccaccaccacagcgccagccaccgactgcgctatgatctaggttaagttagtgtaagccgccgccagttgcttcatcgccgagcccgcgtgttgcactgtctttatgtttgccggcgtccctgacaatccatgtgcgttgcaaatgaacgatgacttccacagctatcttccctctgcagcgcaagggggcaaccctctcataacagagcttgcctcatacttaagtagcgtaatgccgtgcccactttgaagtcgacggcatgtggccatttccagcacgcgctgatcgtcggctcgaacagtgacactcggtgcctgttgagcgtgccggcgccacgacagcggcaccgaaagctctatagtgtcctcgaccgagcgatcgatcgggaaaatcaagctcgtgcaagcatataaccccggggcgacgacgaaagacagctcgccaccaatggctgcatcggtcgaggtcgatcacgcaccgaatctgcccgtatcgtcgatactatcgatgagagcgaacactgacgcatggttccagcgctttccgccgcgtgaaggcatacatgtacttagtacgccgtcggcacccattccactcaccgaatatgcgcgcgcaaatcctgctcgcgcgggctctgacgtcgctcgccagctgacacaggtttcgctactcgttcggtgcttcagctgccgaaatatccaagcggagcgtcaggttgcaactttgacacgcgatccagatggcacttgcgttgcctagcagagatgctggccctgccaacaggcacccctgcctcgcttgaggccgctaatgcggcccgagctcccggtcatttccaaaactcctatcccctcgatacgagtattcccccctccgctccgaagctccacacagcgacgaccaagaccccactctccaccatggtgaacgtgctccgtatgacctccgctctgtccatggccgccgccaccttcggcctggccaacgccggcagcttgcttcaagtgcacgggcatcaactacaacatccgcgccggcccggactgggccaccgccgacgtcaagtgcaagcccgcctcgcagatcgccaccgagctggccacgctcaagggcgtgaccgacaccatccgcctgtactcgctgacggactgcgaccaggccaccgccgtggtgcccgccgccatcgaggccgggctcaagatcgagctgggcatgtgggtggactcggccgcgtccagcttcgaggcggagaaggcggcgttccagacgctgctggagaccggcgtcgtgacggccgacaacaccgtgggcatccacgtcggcagcgaggccgtgtaccgcggggacgtgacggctgccgaggccatctcgaacctgaacgagatccgcacgctgtgccaggcgaactccggagccgccgccatccccctgaccatcgccgacatcggagacacgtactctgcgcacccggagatgatcgaggccgtcgactacgtctccgcgaattacttttccttttgggagaaggtggccatcgacggcgccgccgagcacttctacgagcgcttctcggcgctcgtggagatcgccagcggcaagcaggtgatcgtgggcgagacgggctgggcctcggacggtgtcgacgccgacgccagccccgccacggccgagaacgccgccaagtactttcacgacttctacacgctggccgcggagaaggacctcatgtacttctacttctcggccttcgacgagccctgcaagctggccacgctcgaggccaacgagaccgtggaggcgtacttcggcctgttcacgcaggagggcgccctcaaggacctcatctcggctgagttcgccaacgccaccgcctccttcgacggcagcgactcggccaccatcactgcggtcggcgctgacagctctgcctctgcttctgctgctgctggcgcggtgaccacggtcaacgctgcgtctcccacgtcggccgacgttgccgcttcctcggaggatgactcgaccacgcagggcgacgcgacccaggacggcgagaccacctcggccgtggacgcttcctcggacgaggagaccgcctccggcaacggcgaggacgactcgaccacgcagacctcgactgccaccacgccgtcgtcgcgcaaggactgcgccatgtaaaagctgactgattctgtagcaactgagagcgcgtgggtcgtcgatcgaccatcgagtctgcatgtagacaaacgaaaagtgagtcagcccatcaatacaacacacaaatgagccatgagcttcataccagtctacgggtcgagttctcggacgacagcggcgaagtcccggaggggtggaacgctggtgtgacctcgagccgcgcaagtgatcgggtttgcttggcttagcgtggtgagccccgcaacttcaacgaagttttggccaatgaaagtgaatcatttaaaaaaaagcaatggaagcgaaaaatatttttttctccaaaagagggtgggcgtagctccaaaaccaggtagccttaacaaggtcgctgcgggctggacggagacgcttctggcagtgtacgacttgacttatccatgctccacaggaaactccaaaaggtataatacatgtactgacaaatcacagcattacgatacgaccccaaacgcagcacagaatcttcctcaacaccttgtccaatggacactgtaattaccgaggcgcagatgtcgggatcaggagccgacaccggttacatgtaaactcacaagaccatgatcaacccgagttttattccgctgtcaccgacgattgcgatcgagctggccgttgtcggtctgcctgtcagcgttccctgcactcacccagctctcagcttgtcatttcggatctaactctcgacccagcaagcgactcgactcctctctaccagccctctccccaagccgagcatttcaacttctcgccgcatcgctcgtctccaccgagcagccaaccctctagtccaacccttctgtcacggtccatccattagtcacggtgattgaggacacttttttgctgttcggtggatgacaaggtggtcaagtttcacgtgtggagcttacatgtattggatgtgcaaggatgcagtgaagactagtattcggacgacaaggtggtgagcctgcttagacgcgcctcacgcggcagcctccaggcctgatggtcgccggagtaccctcttccgaacccttggtgctgccgtaggtctggcttccgctcttgctggagcccgtggtgctggcgctggcaccttcggtgctgccgtaggtttggcttccgctcttgctggtgctggcgctgcccccttcggtgctgccgtaagtttggcttccgctcatgctggagcccgtggtgctggcgctggccccttcggtgctgccgtaagtttggcttccactcttgctggagcccgtggagctggcgctgcccccttcggtgctgccgtatgtttggcttccgttcgtgttggagcccgtggtgctggcgctggccccttcggtgctgccgtaggtctggcttccgctcttgctggagcccgtggtgctggcgctggccccttcggtgctgccgtatgtttggcctccgttcgtgttggagcccgtggagctggcgctgcccccttcggtgctgccgtatgtttggcctccgttcgtgttggagcccgtggagctggcgctggcctcctcgtttctgatgacggggcagttggggcccagggcgaggttggcgatctccgccttgagcgtccggtcctcgtggaagagtccgaagtacccctcgacggtggcgttgctggcggtgatcttccactcctcgtcaaagccctcgaaatagtagaacgggaggttgcgcgcctgggccatctggaagaagttgtagaagtagcgagccgcattcaccggagacgcctcggacgccttggggctcgagccacccgacgcccagccagtctcgccaatctccaccctcttgccgagcgccgcagcctgttggtacaggggctgcatcctcgtgtcgaagtactggacagcgttttcaactgcgatcttctcccacatcggaaacccatttgcttgaacgacgtcgacagcgtcgatgagattcgggtgcgccaagtagacgtccccgatctcggcgattgtcacgggcacagacgccaagctgtacgcggcgagcagagccttcactcgttggagatacgcaatgttctcctcggccgtgatctccttccgatacacggcttcgctccccacgtggatgtcgacgatgctgccgcccgagaagagactcgagtgctgctggatcaaggtttggagcctagagaactccgcatcgaacacagcttcatccccactcacccagaggcccagcgacacactcaggccggtgttgatggcggcaggcaaaactctggagacttggtcgcagtccccgagcccatagaggcggacggatcccgttacttgatacagcgtctccatgtccgcctggatgtccgcggcgctcttgcattgctgaccttgagcagcccagtctggcccgatgcgggggttgtagttgatgccgtggatacagaagctctgcgccgcttgcttggtcaacaaagcggaggtgaaggctgcgatggcaccgagcagcttgaaagatagcatcgctggtgcttggtggggagtcatgttttcgaggtcgctgaattgtaaatgagcagtctgggaggactggaggagccccagaagcggcagtatcgcactgatccttcgacactgacactcggtgggttctccacacaagcatgagcttgtgttcatgcatgagcccagttgcaagtgtaacggaaacacggtgtgtgcgttgaacgcctcgtgagatgcagtcaactgcatctcatgacagcgcttttcgatgatgcacgcagctcatctgtgatcgcggtgagatggtagctcgcgagtgctcttgaacacgtgaatatgttgcttgtgtctatgggcctcacatatggggacgggcgtggaggtgtattcaagagcttagattgacaacggattcatccctaggcttctgcgcgacagcggtggcctcaatcgaagtcgaagtcgcaagttgaagtcgtccgtttccgttcaggagaagttgaaacgaccatggtacgttgcaccgtaatcccaagtgcagagcttcgtcgtgactcaaggaggctggcacaggctgcagtggtaagctgcagccacatcgttgagcgcaaccacaccatcgtagtcgcaacatccccctgcgagttcttggaatgcgaagtcgccacaaatttgcactcggcggagcttagtacttcttgctccatggcatcgctacacacccgcattccagggtgtggtgcaacggcgggttcaggcaggcgtacgccacagatttaccagcagcaacaaccttgttgcgtgaagtcgcgcggtcttagcgcttgaggctgtggtcttttcgatttggtccagaacaacggtacgtattataaacattgtttgtaacgtcggtagtgaaacactttagctactgtactaagtagaatttacgaaagtgatatgtaagtagttgtgtagctctactaccgagcttcgctgcaaaaaagcttgttcacaggtcgaagacctgtgcttggccccggcaataaacttgtaactttccaaaaccgggtaccaaaccgggtctctctttcttaagcaactttgtgatcatcactctagttgaagtgacacgtacagtgtggttcttctgccctgctattaataatgagagcgcagctagcccccacgaccagcacacagcagatttgaaccccaatgggaccccgcttgcgaatgttatatacccagcagcagccagctcttcttccaccgatcgactgcagctcacgtccgtttgccgcagccctctcgacttccccttatcgagagctctcccaggaccataaagatgccgaccataaccgcgatggatcgcccactcattcgctatgcgctaacgacgccccccgttccctctctgttcgaagaaaagagccccgtggcgaaggtcatctgcttggagcctgaaaaagaggctgcgcagtcctttggggtccacatgaggtcttgcgtttgagttgttgaagcagagcagggtcggatctatcaggcaaatggggggcgcatgcctcccatttttttggctggtcgttatttttttgattgcctctttcggttgtgtagagggtttgccattcctagaatctcgtgtgcaaccagcatgagcggcaaaaagcggctaaaggctacgccgataacaacatttttcagcaaacagccccgcgttcactctcccaagcgcgagctacccaatacgcttccagaacctctccctcctacgctccaagagcaagatgacaaggccaacgtgttatggtgcactctctacaatgtacctaacgacctcagactttgttgtaaacgatcctgcgcatcgcccgccgaacctcttccgtgttcgacaacttgttgccgccccctctcttctgagtcaagtactgcaaatgtatgcgcgaaaagggccctaccaaccgaattagagtcgcaattcggaggtcggatggtgcggctaatggaattgtgtggcggaataagtccacgtcgctcatttgctaggtggaatactgcggatattgtacgaatcgcgtcggacttttacgcatttgactttgacggccatagagagccaagccaacagattcgtcaacacggcgaagagggacaaacgattcgctgggctggtgtttacagaggaactcagcaaagcgttgacctagcaggacatgatccctagcttccctacattacaccgcttgattcggctagtatgtgttttgccagtgtctaccgcagaaacggaacgctctttttcggccatgaagaggttgaagacaaggcttcgaacgaccatgcgtgaggcatgggtgctggatttactgctgctcagtatcgagaatgatttatctgccacggtagatcaagaagctatcctagacgcttttcgtgacttaagggaccgtcgtatcctcatctagctcgaccccccaacacaaacatttttacaaatattttttaagctggagttgccccccccattttttaaggccaagatccgcccctgaagcagagccacgtcgtgccgtcgcagaacagagcaagccggtcgacagtcgatcgggccttgcgttgagtattacctctatcccccgagcccgcagcaggccacggagagcaacccctatcatgagcgacggagctctgcatcgacatatatttcgtcctcaacatgggctctgtcttaacggaggttgtccgctacagcaaccgtctcaccagcttgtgaagtctctccaatgccgccagtgtcaaatttatcgccagcgtcttccggttcactgtcctcctccgtgcctgtggcactctcttctgcaatagttgcgcgctgcacgggccgctagacactcacgcgttgaatgatctccatgaaatcggcgagatattgtttttgtggcccatggtggtaatctcgtccagaaccaccagcttgcacgccaggaacggatccttcacgtcgcgcactcggaacgaattggaaaatatttgctagttttctctgtggaagcgaaagaacaaaggatgttggcatttgatacgacacatggagtgacttacaagagggcgagaaactcgacaagatgcatcccctgcttctcgccaggcttgcaatacttgcccatgtgagcatcgtatagcttatgtagctgttatacgaacggttagatgataccaacgattgattctagatacccaagagagaacagacgcaccagggttatgtgctccgtgaagacgtcactgacctcttccgtgtacaggccggaactcgtttgcgtcttctaaactctattttcctgcatcagcttgtcaacagcttttgcgggggtatcgcacgcgttggctgtaagaaagaaaagggggaaatcataccaaatcaattctcaatacagcagaagttgagtactaacagagcgcgtactttgaaagtatttgcgatgcgaatgacgcactcgagaaacccgaaccgcatgagactgcggtctgggttgcccttctccttcgcctcctgcgtgagctcgaggttggccgccacgaacacgttctccaagtctggaagcgaacagtactcggactgctcgtccaggatacgagcttctgaaataaactctgtgaacctgaccacggcacgcacgttatgtcattctgcagctgcactgcagctgctggcgtgagagatcctaacggcgccaggttcattagaacattgtgaccgcaatagcgtcggtagccattgcacaccgtgcgatacgagcgcgtaacactgagttccacctcgcgccgacgaatctgatccttcacgaaccggtcgatcttgcactgccgccaatccgcggcacacgccttcgcgataaattcgtccgtgtcgacgcctttcgctgcttttgcccgagctgcgcggcaccagcgtgttgcatgagtctcgacctccacgctgggtcagacgaaagtcaagtcagaaggtatcggacctaaaagtgttcaccaacatggctgcgtgtgtggctgtgttgagcagtacatccgtcgactccttccgcagagcagcttttcctacgttttcttgctggtttcccgcttatttaactgcctcgaacctcaacgtgttcaccaacatggctgcgtaccagaatgagactccattgaaagtgtccgaatctgtggggaccttggggaagagccctgtcgacccgctgctcgtggagattcccaaggtttggtttgggaacagaaccaagttttggtttctgttggtggatgctggtacgcgggacacgcttgcgggcactagagaatattcggtctctctaattgaagaggcagtgcaggtggaatagtactcgagatgcttttgccacacactccaactgaatcgccggtggaagcgtgtaaactcaagatcttcaagagccgccaagcgtatgagccatgggcgaagatgatcagattggagaccaagcagagtgcgctcattgttgaagtgccaagcctccctgcgattgatccagcgtcaactcggttcccgtaaaatggatcagctcgaagacgctcttgaaactgaatccccacgaaagaagcctaggctgctacaatcacggcttgcgcctgcagtgccagtgttcgagggctacttctcggttccattggagagcatcgccgccttccagacgataaagcaggggttctccgacacaagattacctgaacgaccgctgtttctgctctatggtcctcgacagtttgggaaaacaaccattgcctacggatcgacacctggctggctgctgaagttcctgatgtgatgtgcgattctatcgagttgctgggtatcgaaaacggagcccacttcgggcagaatttgggtgatccattcgacacgcaaagcacatgctcagactcggtatcattgctaaatgtggtggaggcatccgccgcgcgcacgaagaaaagggtgtgccttatcgtggacggggtggactccctgtccgcggaccgagctttgataagggtctttctatcggtgcttcgtgagttaaaggtgacatcctacttttatggattccttggggtcggcagttccgctttggcgtgccaccatgagcttgcttctgacaacccacgtgctagcttatacgctgaaaccaagctgttgcaagccgagtcattttcagcgatgcagatggctgcgtttttcgagctgatcgagccatgttttaactttgcgaagtctcttcggcaggcgattatggagtattctggtggcgcacctggcgtatttggttcgctggttcgctacatggctacgcatacgaagtggacgaaagagtggtgtgaataggagccctggtttaagctggttgccttttcggattacctgctactcaacaacgcgtacttttgtatgaataaggaaatatgcggcttggcagcgttggagaggcgagcactgaaatatgcgcttcaggaaaaaaacgtgaccgccagggagttgcagacactttgtggcgagtctatcacgagtggagagaagattgccgacaaattgctagacgtgggaattctggtacaagcaatggatggaaagttccgagacggtgcaccgcgtttgtgtcgaagcactgcccgaacgagatgtacaagctattgagaatgctggagacccgctggtgctgctatctgctgccgttcgtgagatgagaccagaggtcattacagaccttgtcttcggaaacgataaatgtccgcctgtggcagcatttcaccaggagttgttctgtacgatgcgagatattttgaaggagacgcaacggtttacgagagaccgtctcaaagcgcagtcgcccaacagcgcacacagagccgatattatcgttgaggacgaaagtgttcgattcggttttgaagtgaaagtcggcttgtcagacgaaaccgcggttgttggggcggtgcggcaagctgacgagtatcgcgttttctattcggccaagcaaatgttcctagtgatttttactccgcctgggagcaattcccctgaagtgaacagcgtgaaagagttccccgaagtcaagatcattcaggttcgcttcgatgaaacttgcaatacgttctgtcttcagctgctggagtaaatgggcgccagaggtccgaaaatacagtactatattgaattgagtacgagatcagaccgtaataaaaattacaattcaacaaggagaaataataaaaattgccgcaatatacatatactgctcttcaatttgaggcatttctacagaagaaataaaccactttctgtgcgtcatatgattacagagtcgtttggaaacactttttggggtgttgctttagaaaactttgcatggtggatgcttaaacaacctaccggtagtaatacgtgagcgagatatatctggatcttgctatatatcgttaatctggtgtagtggattccagggtttcaccttggtatcaccgcagttaagggctcgatagcatgtcgcggcggtgacccacgccagccacaggtaatgggttcaccgcatcatgaccagtcaagcttcacacagacacacttcatagtgtgtgcacctgatatgaggttacagactaagcattttgtatgatcaactgcttcgcggacccacttcgctttttctcctaaattgcctcaaaaggcgtacacactatatcaaaacataaagctcaagtccctagtggattgccatccgctgccgtcccctgatgtgatgtgttcggcgggattcactacatctggacgtcattgatgttctgacttgcgtacatattggtttctaaagatgttgattgcccattatggcttttactgctccttaatcgttgcgtatgtagacctaactatcctgttatgacgtactttgctatgtttggcgcccgtgcaaccttttttcatattaattgtcaataattggtacaatactgtattgtattggaatcgttgatctccaataataaaaattagtattgcaaaacccaattatttattggatcgcaattattatttcggacctctgatgggtgcctgccaaaagggtcataaggacctaacatagttaccgcagatatgcgggtggatatgtcgacatatagcctagttgcacccgccacaacatgcttatcgacaacaactccgttcgattacaaatgcccaagtaccacgtctattcgccctacagcgtcactttgctccggacattcctatggctagatctttctgcagtttatcttctgcccacgctgccgcggtgatggagctccagaatgatacgtgcgacgctctgtgtgtgctgtgcaaggcctacgtgagctacaacaaggacctgggcgctgttcgacgcgcgattcacaagcggctggtggaagaagatatatgacagcctgtcattgacaggcgatcttcacaagaatgatggtcgacatattcatagtaagtcgttaagatgggtacacggcataaccgccagttatcgagacgattttccggtctcacgagatttatgttagcttatgccgagcatatctgctgcatttactccgggtccttatgacccttttggcaggcacccaatgtaggaggacaggattaattgatgtatctacagtagtagatattaatgatgctggagtgtgttcaaattggcagacgtagtttatcacggtatggtttatacgtagtctatgctgatagtcttgtagtcttgagtagtctgtacttcggtgatctctctttatgcattgatagcaaaaatatgttgataggtactgtatgtagctcagctcaggcgacggtggacgagtgcagctcctgctcgagctcccgcaggaacagagcgaggtagtcctggtccacgcgacgcatggtgagcttctgctgcagggacacgtagccagcgagcttgagcagcttgataatgctgggggtggccttgagcatcttggagtagcggatgtcgtcgtgctgcagcgtgcggaacttggagcgcacgccctcgcggtgaagcgagcgcaggaccttgaagatggacgtgagcttgcgcgcgcgctccgtgtcggacgggcactcgcagcggcagctggcgaggcacgcgcggatctcgcgcaccgcctcctcgatttggtgtgctgtggggatgcgatcaggagcatcgtcgctccatgacggcttgtcgtagtcttgcggttcaccggacgacgcgccacccatttgacttgactggaacgggagcgacgagcttcgaggacgaacgagtcccgccatgagctctcggagctcatctcgctcgtccctattgacggcaggagccggggtcagtggcgaactgggcgagtcagctgggttgatcggtggggacgctccagcctcggccgtcttcctctttttgagcaacgcactcagatcctcctccacatagaacgcgtcggggccctggtacttcttgaactgaggctcgcggagaccatcgctgctaagcatcgacaagtcatcggacgagtcatcgaagctctcttcgtcggatgaagacgaagcgtagtcgtcgtcaccgccgtatctggtgcctccagtcgtgcccagcgcctgcaagtaggacccctcggtgggggaagcagaaggccggttaagacctggtgctttcttggtgctgccgttgctgctgttcaggtcgccattcggcttagtcgacttgttaaacgagtgccgcattctgtaatccggagacacgtgcttcttgggcggggacatggggggcggcgggggtggaggagggctaattggagccttcatcactgtcggaggcagcggtggggtcggaggtctggacacggacttccgggatcccccgcttgctcgcacaggagtctcactcgacgccatcacgcctcgaagctccgacacgagctcctgggtcgtcaaacccctcgacccaatagcatcggaaggcagcgacatcgccctcgggccagacgagaccgatgaagacgcgtcaccgaggatcgaactcttctcgtcgccacgctcgccaaagatctcgaacacgctctcgatttccatctgcgccgagcggtctcgagctgcttcgagtcgctggcgggatcgcgcttccggctcgggttcgtcgctgtcgattactgaaagcttccgctgcgcgtcctccaggctgcgctgcaagtcccgaatcttcttctccagctcgtggatttccgtggcgcggcgcaccgagtctgcaaagttgtgcgattgcgcgtcgtcatcgtcatcgtcttcatgctccgagccgtcgtgctctggctgatacgtggccatgagcttctcgtagttcgacgcggagtacgggtctggactctgagccgagctgtcgtcgtcgctgtcatacactgtcgggtagctggccacggatgcagagctcgctgacacgccgtcgtggtcgtgctcctcctggttattgtggccattagtagcctcgtggcggtctcctgcatctgagaaggtggataggaaggcctggccagcctgtcgcgtcgcacgagctgcagcgaacgtgatacgagccacagagttgaactgctcggcagacatcgcagtgccatggtcgctcccgccgtctctctgagagtcctgactgcgatcgctgggccccgagtaatacatggcaggagctgcattcgtagcgttagccagcgcagcatcaaagttcgagactgaactctccagagcgtcgcggatactggtgatctcgctgtacatgtcgttgaactcttcgatctcgtcgctgtccgcatcttgacgttctccatacgccgcctcggacatcgtgaggtttatcgtgtcacggacctctcgaatatgagtcacaacatccgtcagcgcctgcatcttgtcccgagcgcgcagttgcgggctgacgttaaccttgcgctgcgggtacaccggctttaactccgtctcggacgaggcctccagcacttccatggccaagtcgctctgtcgacggtcacgatcgcgcgactcgcgcatctggaaaatcatgtcttcgtacgaattatgctgcggactgcgcaggccgcggatgtacgactcggtgtcgttggacgtcgacgacgccggttcgtctcctgttccggtggcactgagcgccgaaagttgctgctggcgcgcgccggcactcgtcatacaggcggaacacaccctcaagtgggtgatgtcaaagatgggctcctccaattcccgcagcaacgcgcaggacgagcacacgacctctccgcacgttctgcagtggtgtttgcgacggaagtaaaagcctcgcagacacacggcgcacgccttgcggtccgagttgggcacccactgccactgctccacgaacctcaagctgctcactctctgtctcgccacaagtccggggattttcgccaccgcgcacaccgtcttcttcatgagctcctccagcacgcccctcacaatggggttcaagtccccgtcgatctggcaaatggacgtcaccttgaacgtgttgggctggtgcgtcttggacacaattatgcccattcgggacaaatagccccgggcgatgccgaaattctccaaagtgggtacttctcggtccctcgagatggactcctgcacgcaaaagcccacgacgttggacccggggtggggtttcttcttgccggcgtactctaaatagcagaagtccaaaatcttgtcgtcctcgccgtgtctcggccgctgggttttgaacgcgtgccacttgatggcgcggtacgagtaggagcccctggagggcgcgcgcccctcggtggcgtcgctgcccgagcgcgagctctgctgcgggaacgtgaagagcgtgcggccgtccacgaacgcgtccccgtgcatgtagcgcatggccttgcggcagtccttggtcttaaccttcgagactgcgcgcaggatttcgtccactttggtgtcggacaattgcacgctcgccttgagcaaagtggacgcgtgcgtggacttgctggccggctggaagtcgaggaagttggcgcgctggcacgacacgctcggcaccgtcgcgtccgcgcgcggcgcgcgccccggcaggcgtgaccggtggatgcgcgtggacgccgcgctggtccacttgtaggcgcagtcggcgtcctcgatgatgcgcatgagctgcgccacgcgctccttgcccaggcgcttgtagtacttgacctcctcgcggctcagcgcgatctgcgggaagaagccgtcgtgcagggggaactcgagcataattgcaggattctgcaggttaagggaaactcggccggttaaggtaagcttaaaaagcgaacttgaagcggggagatagagagatcaagccgagcgggttgggtgttgccagtctggataggtggttaggtactatcggtagtcgtctcctcccctgggcttccaggcaggttggggatcgcgcgcgcgtgcggccgcctccggacggatctattgaacggagaatcggagagtgagcggcggcgctggcctggcgcgcgcgaaacgctggggaaggcgtccgggcaagagcccgcgagctgtcgtgcaattgtgcgggggtttggaaggcgcccgattggtcgaggcgcgcccagaaagggcgcgcccgttgttgccttcaacgcgatgggtacaggcaaagctgatgcgatgtctgagacagtttgccggtgactgccttgttgcgctccattgggaggcaacagggcgagaaggcttttgccgcttgcaaggccgtactctgcaggttaagtgcagcgttttgccgcttttaggtgtggcggcaacggttaagggaggggtgcggcacgtacgcggcgatggacgatgacgactgccgcggaacggcaagataccattcgcggaagtcggctccggaccagtcagtgagtcagtggctgtggctctcgctcgcggccgccaagttgccaccgatgccgcgtaacgctgcggtttccccatgtgagctcgtggggctgcttttggtgcttgggccaaagcgacatacacctgccagctcccccagctgtttcacagttgaagcgagctccgataagcaagcttttgcattgcctttgcatttttgaggcaacaaagggcaagatggcgcatgaagggacactcgcgcttgactcgcatgatctagaaccttagcagatcttagtccgcagctttcggaactttaggcgctggttgcttccggtggggcagcgctgcgcctgcattgcacacgggcgccgcacgatcgagtgaacgttgagtgctgcgtcatgaagcgtgaattgtgtaccagctgctggttttgctgtcgctcgagcatttagcatgccgtcgtcgcccttcaataggactacgtatccgcccgcagcagatacggtagacaagtcgtgctgtcgcggatgcaacggcagaggggcgggtccctttgagagggggcaacagggtgcgagtaagtggcccagcagtgctaaccttcgacgtcttggccttgagaacgctcgcagatttttgatgcatgatttcctgcgcaaggtcgtgagttggaggtcacctcgcggaccgctgaactgaccagatccccttgacgtccaactcagagacgttgctcttgccatttagttctcgactgtggccgtgagcaacatgggacgcagcacaagctctcgagagcgaggcgagttctgcgtaacgctgcggtttctgacttccgggcccaaagccaaagcgacatacacctgtcttaacgttgaagtggtcaagacacgtgacgaattaactgctcggatcggtctagtcggtcctaggaactttaggatcttgattgcttggctactgcctagtacgccgtgaaatggttagccatcggacttgtagctgcactgagcggtagtctgcaacgagaaaaaaaaccttcgcgtttcaaattgctagttttggtggttttgcgacattctcatcggtcattgcaggcgctgatgttttaacttcgttgatcgcagcaaaagctcaactaaagcgagaatttgtcaattacactcaacatcatttccattcggaagcgcatcggcatgtgcctgcgtttcgttaatggatcctgtcctgcttcaccaacagagaacaaaacgtgttgcagctttcatcgaagcgaacccgaatgatcttgacttcggggaactctttcacgctgttcacttcaggggaattgctcccaggcggagtaaaaatcactaggaacatttgcttggccgaatagaaaacgcgatactcgtcagcttgccgcaccgccccaacaaccgcggtttcgtctgacaagccgactttcacttcaaaaccgaatcgaacactttcgtcctcaacgataatatcggctctgtgtgcgctgttgggcgactgcgctttgagacggtctctcgtaaaccgttgcgtctccttcaaaatatctcgcatcgtacagaacaactcctggtgaaatgctgccacaggcggacatttatcgtttccgaagacaaggtctgtaatgacctctggtctcatctcacgaacggcagcagatagcagcaccagcgggtctccagcattctcaatagcttgtacatctcgttcgggcagtgcttcgacacaaacgcggtgcaccgtctcggaactttccatccattgcttgtaccagaattcccacgtctagcaatttgtcggcaatcttctctccactcgtgatagactcgccacaaagtgtctgcaactccctggcggtcacgtttttttcctgaagcgcatatttcagtgctcgcctctccaacgctgccaagccgcatatttccttattcatacaaaagtacgcgttgttgagtagcaggtaatccgaaaaggcaaccagcttaaaccagggctcctattcacaccactctttcgtccacttcgtatgcgtagccatgtagcgaaccagcgaaccaaatacgccaggtgcgccaccagaatactccataatcgcctgccgaagagacttcgcaaagttaaaacatggctcgatcagctcgaaaaacgcagccatctgcatcgctgaaaatgactcggcttgcaacagcttggtttcagcgtataagctagcacgtgggttgtcagaagcaagctcatggtggcacgccaaagcggaactgccgaccccaaggaatccataaaagtaggatgtcacctttaactcacgaagcaccgatagaaagacccttatcaaagctcggtccgcggacagggagtccaacccgtccacgataaggcacacccttttcttcgtgcgcgcggcggatgcctccaccacatttagcaatgataccgagtctgagcatgtgctttgcgtgtcgaatggatcacccaaattctgcccgaagtgggctccgttttcgatacccagcaactcgatagaatcgcacatcacatcaggaacttcagcagccagccaggtgtcgatccgtaggcaatggttgttttcccaaactgtcgaggaccatagagcagaaacagcggtcgttcaggtaatcttgtgtcggagaacccctgctttatcgtctggaaggcggcgatgctctccaatggaaccgagaagtagccctcgaacactggcactgcaggcgcaagccgtgattgtagcagcctaggcttctttcgtggggattcagtttcaagagcgtcttcgagctgatccattttacgggaaccgagttgtgacgctggatcaatcgcagagaggcttggcacttcaacaatgagcgcactctgcttggtctccaatctgatcatcttcgcccatggctcatacgcttggcggctcttgaagatcttgagcttacacgcttccaccggcgattcagttggagtgtgtggcaaaagcatctcgagtactattccacgaagagcgcctgcactgctctcttcaattagagagaccgaatattctctagtgcccgcaagcgtgtcccgcgtaccagcatccaccaacagaaaccaaaacttggttctgttcccaaaccaaaccttgggaatctccacgagcagcgggtcgacagggctcttccccaaggtccccacagattcggacactttcaatggagtctcattctggtacgcagccatgttggcgaacacgttgaggttcgaggcagttaaatcagcgggaaaccagcaagaaaacgtaggaaaagctgctctgcggaaggagtcgacggatgtactgctcaacacagccacacacttcaggggagcaattggtcctccttgtctgttcaccaactggaaccacgcttcttgctcctcctccatcgctctcccttgtactccaatttcggtaatgaagtgggtgtccatcctaccactgacttgaatgcactcgtgattcaagtgacttgaggcgttgtgacttgaatttcgacttgaaatccttccattagcacacacacgcacagtactacgtagtattgttagatacttcagcacaagtttctacttgcaattcaatctatagaccccccctttggtgcgagtccgtaaaggctcgtgagctggaactcgttcgtgcagtcattgcttaagatcaaggcgaactatcaaccgacactgttaaggaagatcacttcaactttggtcgctaactcgatacacgatgagcagtctgctggaagcagcatcgtcctcatctctgatgaatcggtttcgaatgaactagctcactccgcggctgcctccccagacggagagggagcagacgaatctttcctcaccccctcaccctccgacgctataagattttaatccgaggcatgtatagacgcagatgtcgggatcaggagcggacaccggtacatgtaaatctacgaccgtgatgaacggtcccaaacccgactttattcagctgtcaacgcgcgggattgcgatcgagcttggtcggtctgcctgtcagcgttccaagcgctcagcttgtcatttcggatctaactctcgacccagcaagcgactcgactcccctctacagacctctacccaagccgagcatttcaactcctcgccgcatccatcgcctccaccgagcagccaaacctccagtccaaacccgctacaatggtcgcagcctcgactgtgcgcgccgcggtggtcgcgtcgccggagcagccggagcaggagctgagcccgcacttcgcggacaacttcgccaaaggaattgtcattcacgacaacaagtcccaggaggaggaagagcagccgaagctcgagatgtctgagtacaaacgcaaggaggttaacggcgagctgcagccggagccgtacttggtgtcgaacccgaaccggttcgtgctgttcccgatccaggagcacgacgtgtggcagatgtacaagaaggccgaggcctcgttctggacggccgaggagttggacctggtgcacgacctgaacgactggcagaagctgacggacaacgagcggttcttcatcaagcacgtgctggccttcttcgcggcgagcgacggcatcgtgaacgagaacctggccatgaacttcagcaacgaagtgcaggtgcccgaggcgcgctgcttctacggcttccagatcgccatcgagaacatccacgccgaggtctactcgctgctcatcgacacgtacatcaaggatacgatggagaagaaccacctgttgcgcgctattgagacgatcccgtgcgtcaagaagaaggcgcactgggcgctcaagtggtgcgacccgcgggtgtcgtcgtacccggagcgtctgctggcgttcgctgcggttgaaggcatcttcttctcgggctccttctgctccatcttctggctcaagaagcgcggcctcatgcccggcctgagcttctccaacgagctcatcagccgcgacgagggcatgcacacggacttcgcgtgcctcatgtactccaagctggtcaacaaactgcccgagagccgcgtgcacgaaatcgttcgtgaggccgtcaccatcgagcacgagttcgtgtgcgactcgctgcccgtggagctcatcggcatgaactcgacgctcatgtgccagtacatcgagttcgtggccgaccgcctgctgtactcgctgggcgtgcccaagctctacaacgtcaagaaccccttcgactggatggacatgatctcgctgcagggcaagaccaacttcttcgagaagcgtgtgggcgagtactcgaaggccggcgtcggcgtcgcggccgaggagcaggtcttcacgctcgacgcagacttctaagtgcggcgtcgatggggtgtccatggtgtgattgggtgggctctgcgttggccatgtctaagtatctgtaagtttgaagaagcaacggcagttgtaagccagcttcgtcgcgtaattaaaaagtaaatgttacgaatgttatcctagcgttcagcaggccggcaaagatctgatgccgcgtaggccccgcaattattgtaattgaagtttggttgggcagttgcggcccaccaacaacatccgcaatgtgccgccagccattatttcctgccagctacttcgacgtattatattgttcggttcgagtgtcgtctttgtttcttacacacaaagacactgagttggctcgacacatgattccatccccctacttgtttttttttaatcaaagatgcaacatggcaacatagctgatgtagttgcgatattacattaccataagtgcttcatttgtactcagtctgtacacgaactgataaaacaacgtcaatactgtatcaccacgctattcccgcggtggagtacgaaattagggatattggtcgagaatccaggcgtaaatcccggtttccttgtggcgagctgccaattccacggtctccgcggtgcagacttgtttgcattgtgagtacaggaacagcaacagctcgaaattcctgtgatcgaccgcactgttgatagcggagcttgtgcgtccttccgagcaatgagtgtggagccattgcacaacatgaaagtggccgtgcagcgtcgccttgtccatcgccaccgtcgtgcatccttcaccacgattacggtgcaaccatttgacaaccgccaagtgaccattctctgctgctccgtccattgctgcgaccgtgcacccttcactgcgatgttcatgcagccactggacaatatcaagacgcccctttgtcgccgctccatccattgcgtccgtcgtgcagccagcgttcaaattattgtgcagccatttcacaacgtcaagatgtccattcgtagcagcgccgtccatcgccgcggttgtatatcctttcgctgtgttttcatgtagccactggactacaggcaggtggccttctgatgcagcaccatccattgcgcgacttgagcagccctcctccctgttttcatgaagccatttgacaacctctaagtgcccatttgccgcagcaccatccattgctttactcgtgcacttgtatccgcctcgattggatccatccctgttgcgcttccgactatcagcggtaggagctccaatcttctgcatcgacttcagcaccctcaggtttccccgcgcagcaatggcatccatcggtgttccatcggcctgtgtctactgacgaccggtactaaatgcgctgacttttgggtcgtaaacgtactccacccagagccactgcacgacatgaacatgaccattcttcccggcttcgattaaagtatcgatcgtgaccttggcagctttgcacaattctccaaggcgtattttcagacttcgaatctgatgaaggtgttcctcgttttccaccgcgcgctgataagcattcaaaggtttatccgcccgcgctcgaaggtattttgcgatctcaagatgtccatttaccgccgcaatgtggattgcaagactggcctctcctcccagatccgtcagtcggctctgattgtcatttgcatgactcctcaagtccaggtccagcagccagcgcacaacctccagatgtccatactccgctgccatcaacaacaccccaccagcggtacttcgcataggttcatttttctcgagccactggagcacatcaaggcgaccttgagctgcaacctcgtgcactaaattgtgtcctataggcagcaccaaaacagcaccatgagacagcagccactctgccagaataacgtccccgttcttgacggcgtactgaacagccttgctcctatcgtatctcacgtctggaacgtgctgcaatagccaccacacgacgctgttgtggccgtgcaacaccgccacctccagggcgtctctgctccagtgaactcgatgccccacgacaactcgtttgctgggactggtagcttgcagttgcgtcttgagcgaaatgttgtcgttatcacggaaaaactttaagatgtccatggctccgacactgacggcggcggtcaccaccatgggggtgatcgggtacccctggaagttgacagacagcgacttgaccgaatcaaaatgtttacgcttcaccgcctcatacagtgaccggttgaactggtattgacggtaataccggtcacttcggaggtggcagcattggatggagcagcagagaatggtcgcttggcggttgtgaaatggctacatcgaaatcgaggtgaaggatgcaccacagcggcgttagaccaggcagcgcagcagggccacttccacgtagtggaatggcttcactcctatcgctcggaaggctgcacaagcgccgcaatcaacagcgctgtcgatcgcggaaattttgagctgttgctgtttctacactcgcaatgtaaacatgtctgcaccgcggataccgtgaaattggctgctcgtcacaaggaaacgaggattcacgcgtggatgctcgaccactatccagaattgcgtacacgaacgggggctgcatgagaaacaattcgtcctcgtcaaaagatcggcgtaaattgccaaaccactttcaagtcaactacgatggactcagacgatcctcggtaattcagagtcaccgcgactgtacaccactcggcaagcttcggctgtctgcggcaacctaaggcaccgcgacttttatttttactattacttcgaaatacttgtttcttctgacgatgcatctactgtacatttacgttaaaagtcgatggaattttgaagccgattcccctcggcaaaactgtagtgcaggtagacatatatacaactcctaagattagagccggctgaaaaatattctcggaggatgagcctgaaaaaaaaacctattcagtcccacctttcacaggaagccacgacagtagttttagatggatagaaacagtcaaaacgcatcactttcttgtaatatttttttaaatgttctcacaagataccgactttatttatttatttattttttgtgatgatgatgaggtatattgaattacttaaaagacgtaccgactttattgataagagccattagttccaccacaaaagaattcggcacaagtgacctcgatggactttcgagacgaaggtaaagctgtactcttgcgtgaactgaagcaaatattcaccttactaagtgcaaaccatttttttaatacagattcacttcatcagatagacaacaatcctgtcgtgaatgaacccacgcatggtgtcgtgtcgcctttgcttgttgtggagctcctctttcgatccaagagcagcttcatgggcctgttgcacgtcaccaactccgtctcacagttccttgactcgtcggtagagttgccgttgcacaaggcctgtgcgtttgactctctgcgactactggaccgcatctgggcctcctctgaggccttcaaccaagccaattctaccaatagcggttgtagttagtctctccggagtcacctccgctccgaccgctactacttatctcctaaaccacttcaacctgtcgctggaggaggcagtgaagcgtaaacattttgatctggtgaagtggctatccactaacttccaggggtttcctatcgtctcccaagtggtgaccacggcagccactgtcgggaccatggaagtcttgcggctcattcacgataacgataacacttcgctcagggagcaactatcacggggtgccgctcccttatttgccggtggacaaattgtcgtggggcatcgagtgtattgcagcagagacgcccaggaggtggcggtgttgcacggccacaacaacgtcgcgtggtggctattccagcacgttccacatgttagctacgataggaacaaggcttttcattacgcggtgacgaacggagatatcgctctggcggagtggttactggatcacggcgccagcttgccggtgatgacaccaggaaacgtgctcgtgcagggggtggcagctcaagatcgccttgatgtgctgaagtggctggagaaaaatctagttagagacactgatggtgccttattgacggcggtcgaattctctgtccctcgcgcacaagtttctgaccgctgaacatgagcatggcgtcgctgaagacccgccagaagctggttgcaaccttattatggtggttgccgcccctccccactttcttcttctccagctttgccatggctgcgcggaactcctgcgagttctcccacgggttgtccggacatccgaagatttcgccccacgtcaccatgggcttcgtagcgacaacgcccccactcgccaattccccgtcgtgaggcctccattcggtgcccacctggaacggtagcaggtagtccgatagctgggacgcgaaggctgcgttgtcgaccgctggaaggaagtcaaagagctccagcgcttctcggatccgttggagtgagtctctttcactgaggagtcttgcatcggtgggaaagtttacgcgcatgtgtcgggggtgacgaacttctgctcatcgggcagtgcgtcgggtcaacattgaaaggaggcgcggatgtgtcccgcgtcgtgggcagtctcagggatctggaggacagactgaagggattcccgccactgctgcaggaatgcccacttggtctccatcttgggggggggtcttgagaattacttgagcggaaggtggccaagtcagaagtgagcacaatgcgagtgtctcttgcatcgacctcgccgctcttcgtcggttttgatgactctagttgatgacacggtgtacctccagttgcactgcccccgagttgcacatgttgtgctgatagttgggatggtagcacactccaattgggaaaatgaccaaactagtattagggaacggatcgccaagcagaacataccaacaaggctccccaaagtaatggtgcgaccttcaccaggcaatgaagaagaggttcccctgcgcaaagaccacgcccagcctctcctcgctatcctcataattctcatcgggatagtgttcatccagccagtcgttgatgttatcggtgggccagtcgatgactcgtttgcgcatgcccttaaaaagtgggtgtttacacgtctccgaaaatgcttcacccctgcagccttcagtgcgttgcgagtgcaagaatagaatgcgatcgaagtctccatccgacgctgcgcgatcaagcgccttggtcgtgcacccctcgactcgattagcctgtagccactgcacgatctccaacgttttggcgtcgtccatagctgcactggtgcagccttccgagcgattcatgtggagccacttgatgatgtccagcttgccattgcgagcggctccatccatcgcagcgaccgtgcagccctcggtgcggttttcatgcagccacttgacgacttctaggtggcccttggcagcagcggcgtccatggctttcgccgtgcactgagccttgacctgtccatggaggtacttaacgacgtcgaggtgtccattttgagccgctccatagagagctttgaccgtgcatccttcgggtcgattgtgatgcagccacgccacgacttccaggtggccaccacttgcagcgttgtgtcgtgcatccctctgaccgatgacggtgcagccacttgacgacttccaggtgtcctctccccgctgcggcatccatagcggcaaccgtgcacccctcgtaccggtgcgtaccgagccactccaccatctccaagtgtccgttcttcgccgcgaggtccatggcactctttgtgcagccttcagtccgcttggagtgtagccacttgacgacatcgaggtggttgcgagcagcggcttggttcattgctcgagatgtgcacgttaacccgcatttgcgcgaagctctcgctttcttcttcggttgacggctggttgaggcgttcgctgcgaccatgatcttgtgaaggtacttgagcagtgggaggtctccacgtcgagctgccgtgttgaggctaagcaccttcttcccccactcggtgagcgagctggcctcaaagaggtcgatctctgagctgaaggtgacgacgagccattgcacgaactccaaactcccctcgtcgatcgctgaagtcatcacagccgagcagatccaaagagggttattgtcacttttcgagaacgagctctgcgctggataatagtgcgacgctgtgatcttcccccagtactcagtgtacagttctttcgacatctcaaggttgcacgccgccgctgacgactgcaacgctcgacctgcctccaccagcttattgtcgatcagaagcttgacaatatccaaacggtctgcgtcgaccgcaggacccagtgccaggtagttccagctgctctcgtagccgttcgtgatcatccactgcatgacctcaagctgcccagcagctgcggcctcctgcatgaagatctcggggtctcctcgcagtagctcgcccacgttctcccccgagaggtcccccggcctcccattccagctcggacgagacggctccacgaatcgaattgcgtctcgttcctccagctcgtactcctccgtctccgtatcagggtcgaacccccgagtgggatatttctctcgaagccactcaaggagattaatgtccccgtgcttcactaccgtcatgagcgtgctcttcatggctcgaggcgcgcaagtgttctggtagagccacgtaatggtctcgtactgcttattggcagcggcgtgctccatatcgtgacgcccccaacggacgacgtggcccttgtcgttctcgatctcgtccctcatggctgcgcctccgtccctcctcccagggatctcaatcgccttgaagaacttcaagacgtccaggttccctttgcccgcagctgtgtggacggcggtgacggggacgatgcagccgtggaacttggtgcagagccactgcaccatccgcagcgcggccttggcgtcctcgatcttgacagcttccacgatggcgcgacgcaactggaagcggcggtagtggcggtccgtgcgcagatacttgcgtcgggtccacgagcccccgttgcccggacccacttccgctggagacgggtgcgtttccggtagcgaagagtcccagatgcggtccagcaggcggagggagttgaacgtgcaggccttgcacagttccatctccactgcagcgtccaggaaggccgtagggcggcggaggcgtggatgcagcgcgaacggaacaccagcgtcacggccgtgagagggtccggggtcggcagcctcgccatcttcttcttcgtcttcgtcttcttcttcgtcttctggacgtgaaaggcacgcggcgagttgcggaatgagtgggagttggcatggcgcgcggccagcaacttcaagactgattgatgaccccagattctcacacgtcacagattcgattttgggtggtcaacattaaatttggatgacttgtgtgcaattttccggcgtaatgatgaattacggcgaatattctctagaaagtaaaaacaactttgaccatgttacaccatgatagctagcatcccccccagtcataattgtttgaggagcatgacatacctaaaactgacaacggccgagacggaatggaagggcggtttgcgtctctcgtttcgcagtctgtcgcttcttgatcgacggagaagttgacagtagcgagtgtcgttgagttcaggacgaccagccggacgaaaggctaattgagagctggcacaactcgacaagagtgagcggaagtcgggtagggtgctctctgatggaattagataaacgagtggtttcattgcttgagcatgtttgttcctcatcagtaaatttaactcgtgatgcgtgcaattcctcgcacggccccatcaataaagcccacgcgccgcaactctaagtccattcctaacgctgtcgatacctcttgagcattcataagtcgtgctggtgttggagatggcactgggtacttggatgaagtacattaaagtatgattcattcagtgcgaagatcgtacgaaattcttttttctgggccatcgtccagttgctgaagtcaagctatacatacatgtagcgacgatggtccgcctactttgaagggtcttgccaagagctggatggcatggcatgacacgatgcaaccgggcgtcgtgcctccgttgctcgtcgtggagctgctcttccgtgccaaaagcgacttcaccgacctgccacacgccaccacatccgtctcacaattcctggactcgtcggtcgagttgccgctgcacaaggcctgcgccttcgagtctctgcggctgctggaccgcatctggacctcctccagagcctacaaaaagaattctgtccgtgacggcgccagcttttctctcggccgttgcctcgggaccgaccgctactatcgccatcaccagttcaaccggtccctgctagaggcagtgaagcggaggcatctagcgatggtcatgtggctgtcctccaaactcaagggctacctcatcgagggtgaagtggtgaccgcagcggccagcgtgggggccatcgaaatcttggacttcttccgttcgaacgacaatacgtcgttcatgcagcgactgacatgacaatacaaggtgttgtgggacatcgagtctgctggggccctgatgcgctggaggtggccgtactgcatggccacagtaacgtcatgtggtggctactgcagcacacaccggacaatggatacgacatggataaggcgcttcactacgccgtgaagaacggagacattgctctaacagagtggctgacgtctcatggtggtgctgacagtccgaaggacacaatatagtgcacgaggtggcagctcaagggcgtcttgatgtgctcaagtggatgcagaagaagcgaggcgtggtgacaaataatcctggggttttgctgatggcggcggagagaggacactggaaatggtgcgctggctgcaggatttggacgcgggaagcaatggcagtcacatcaccgatctgggtgaggcgagtcttgctattcacgttgcggcggtgaatgggcatctacaagtagcaagatatctttgggcgcgggcactggcacctgtggcgctcttcaacgcgaagaagcacggttggaacaggcgattcagttacgacgtttgaccgaggcactcggtggatcgtgcacggctgccaaggtcaccatcgacactgtggtcgaagccggaaagaatggccatgcggatgtcgtgcaatggctcttggcggagtacccaaaactgaatttcggcgatcaacagacacccaccgatgaaaccccgatggatgctattgctgcgcgtgggcatctcaacgtactagtggtagtgcagacgatgaacgttaacgcagatagtcggaagcgcaacagggatggatcgcgtaaaggaggtcacgtttgcacgagtaaagctatggatgacgctgcggctaatgggcacttggatgtggtaaagtggcttcatgaaaatcgagacgaaggatgcacaagtcgcgcaatggatggtgctgcaataggaggccatctacgtgtgatccagtggctacacgaaaacacgtcgcaaggatgcacgaccggcgctatggacggagctgctgtctatggctatctcgacgttgtgaaatggctgcacttcactacgaacggcgatggacggagcggcagcaagtggacaccttcatgtcgtccaatggttgcatgaacatcgcggcgaaggatgcaccgtcattgcgatggacggagcagcagcgaatgggaatttggcggttgtgaaatggctgcacaggaattagtctgaaggctgcacgactttggcgatggactttggcccgcttcatgtcgtgcaatggctccacactcatctctcggaaggctactcaagcgatgctataaacagtgccgtacttcgtagggattgggagttgctgctgtttttccactctcaatgcaagcaagtttgcacggcggagacagtggaattggctcgcaacactggtgacggtgaaatagggatttattgctggtttgtcgccaactaaccacaatttcggccgactccgcgggaatagcgcagccctatggaggatgtttcgtgggcttatgtgaaagctcacgtaaatgtggcactcgtgacaatttccagggcaaaagtgaagtagacaataaatgttgaatcgacacgcgatttttttattgagcttgataccgtaccttactacttttataacgtacgagtaacgcggaaagtaaaatttaaataattaaaaacgcccccgggaagtgatcagcgtgctgcgctggtgcatcttcgtcgtctgcgtcattcccatcggatattattcattcgagctagcctattttttcttaccgctccatggctcgttcgaggctgcccaagaccgattggcttgcaacacccgaaacgtgcataccaggctagttccgcgtccgactgctctttttgtcttggcttggccgcaggttgtcattgtggcaatcgctctgacagcagccctttagtagctacctgagcggtggaaattccttattctgatcgacagtggcgagatgtttcagatcactacttcaacgtgggcctcacaagcctttgcatcgtccctcgtagctgcgtatccgtctcccttcggactgcgcaatttacagcctaaaagatgtggcaacgtgagaatgagggcagggcgcgactgaagcttaccattcgtcaaggaacatcgcatttttaaagctaacaatggtccagacgaagtggaactgcatctttgcggtcattcaaaatcttttccaggtctgatcaactcgcgggttaccgcatactacatcaaactagtcgtcgctccgtagaccaccgctggcctcccgagaacttactaaagtaccaagttacttgactgaagctcacaggtcgaagacctgtgcttggccccggcaaaaatcttgtagctttccaaaaccgggtaccaaaccgggtctctctttcttaattctaatttttaagctaatatctgccggaatcgagtctgcagatttgactttagttttgttcaaacgggtgggattgctcttacggacgctccagtacactatgagagcgtcatggcttcgctgaaggcgtatcaatttgcggcataatcgactaagctttgctgaagatgaccaacatgacttgtctagctgcaggctgcattttttacatgtcagtttgctcaatacccaatcactctttgccgaaaatgcccaacctcttatctcgccaaaccaaccagctcaacctgacagtgacacgagcatcgttcgtttgaataagacttttgtccctgcgttgaagcggccacttccaaggacttggcccattttctcattccgcaatttacccacccccaagtcctcaagtcaaacggtcaagattagcgcaccatgcgtctctccttcgttctgctagctctctcgtctggtcgttagcacacaacataagtactaaatgagcacactatgccttacctgcaaaatgaatgaaatagcccgttgctggcatcaacgcagccattggacgctgaccagggtgttatgtcaccgatggcctcatcacaccaggtaacctcaattggggactttcggtccctgagaacccaccacgataaagaagagcggggcttgctggttaccagcctcgctgaaacatcatttccgtatcgatacacttcgatgtgcgcaactatttgttcaattacgcattctcgggcagatgctgcgcctgcgaagcaggcgcagtagatgcccacgttagagtcaactaaagagttgggctggttgtgcttttaaggattaaaaacaatacaactttgggatttattcagttattatccgttatcatcgtccatgaaactattcgtcgacctgtgtaccctcccggagcaacgctccgggttgcctatacaataacatcatattgaaaacttgtaatagcgcatatccggtctggcatccattccgcgtttttctggttattagctaattgtcgatttcgaaatcccattttagcattaatacatattctttgaacagtaagccacacggtactgccaatgttattgtgaatgttctgtaacggtttattaacgcaaaaatacagaatatcatgcaagtcgttatacttcgtagtaatccgcatctagtatcacaagcagtccgagttgacacagcgcgtaagccaaaccgacgcaagagcgccggcgaccaaattctagattctgcttgtgaaacaaaaagagacctttataatcttcatttgtcagaacagattacttcatgacacctgaaaactttttttccggccagaacgggtatatagaaacccgcagctagtttgctgaactcgagccggtttcacaggtcagaatagaatgcgttgccccgcgggtgagtcctggttagatgaagcaaccttcgattcagccatgttgcagacgcattacagtagtgatagaatgcaaaccacgtgtcggggttgatataactatttttggttatattttgtccttttacttcagctggcccggactcgccctgaagtcgttttcgacattttgcggggcaacgctttctgttaatgtgaatcctgttcgagttctttagcgtgactaagtgcggggtttctacgtaccagttattgttgaaagaagaagttctgaggtctgatgaagcaagctattccgccaagattcctacaaaaattcctatcctgaactggagattggtgatgatatcgcaaaatctaatacctggtcggtcggtctcttgcgtcagtctcgcctaaaaggagcaatgcgttgtgctaacttggattgcttgtgtgattctaaacgatgatggtaaccacgacatgcacggtcgcgttgataaactcttttaaagaaatgttcgtttttatcactgaacgggatccacacaatttcgcatacaaaactttttaaatttattgctgtttcggacggggttgttgtactgcgtagcctactgttcacagaatatgcattacttctttagtaagcatgaccaaggtattgaaatatgctgtgaaggtgccagtgcctctccgaactgtattctccataacgaaatcaaccgtagtgtctactacaataaaaaagtatgaagtacgagaattattagagaactgtagtttcttatcgcaagctgaaaccctcaatactagatttccgccactagctcgcgaaacgtttgctcctgaccctcattaagcaagccgcgcaacgatgcgatggcaccaacaccacgcgactctgcaatgactaccagcaggtttccatcgttcagctccagaaggcgcttgtagacctcgttccgaacgtattgggatgcgaaatccacgaaaacgttacggaaccgttcatcgacgtgatagtgaagcaatgattcaagtcctccgaatcatctgcatccaccatttcacacgctttcaccatgagtagtattaattgtgacttcgagaatcgatttagaaagagccaacttgaaaacattccgtggaatgccaccccatctcaaatagcgctcttccaatctctcgactggaactgtgtcggtatgcattaacgcatggcaggccagaagttgctccttcgaccatactggcatgtacaaaacttcacacttagtgaggcagaagtcataccaagactgaccgtctcagtcccgtcaacagagttgtctcgcacgcgtagtagcgcgggcgaacgtcatccacgatgtagtacgttgaaggtcttcgcaaaatgctatcaaaatcacgagacgaacctcggacgaccagatccgcggtgaatagaacgcgaccaccaatcaatacgtcttcgtaaacaacggccgcgccattctgggcaagatacaccagtaaaacaaagccgaaaaaggttttgcctatcccccaattggcatgaatcacaacgtgcggtaggttcttcgtctcatcatcaactgtcgacatgcacattttcagcaactccgggtaacactggcggatgaagatcttggacccgaacggtgggctccccaaaatgtgagtaccctccggaaactcaatgacggtgccatgaccctgttcgatgtcggcgtcaacgctttccaaaacgagaccagctccggcggattgatctccatgtcctgagtaacccagaaacttacaccactgacaacgagttgcacgtcttgaagattagttgacggtggtacaactacacagagcaggttgtctggagccctccctcgctgattcaacgcagccgacatttcatcctcttcaaccggccgattcgccttgtatgcttcgacgtcgtcgtacacgcgaaggtttttgccttcacgcacgtggttcagtagagcgcggaaaaccttctggaacaccgcatgccatagcatatcaacgctgctctcttcagcgagagggagtgactgcacactagtaccagcaaatgcagcgtgcgtaccgccatccaccaactggaaccaaatcttgggaacttgtacgatgagagggtcatccttgctatctccaaagccacacaagggctccaacaactgcaggcgccgacgtgtactggtaaatacggtgagcgcggaggcacggaagctcggcgatagaggatctcgggttcggtcgaatacagccgcgcagaaatcagctgcacgtacagcgtcgtgggctatatccaaccagtcgacgccacccgcgattgctgtgtgctcggggccggataccagctgataaaacttcctcctccccatgatccgttttgaccacaggaatttctttcgcaacaatttatgaagtagtttttagatgttttttaatgaaaagtataaaataaatcccagaatttgcgagaacgagacgatgcggaaaatattttaccaggtgcaaggaacggaggagtgcaatcgttgcatctacccgaccatgctaccaacatcggtgacttccgcagggttctctttaaccaagccagacgctctcttcccccaggtgtcccctccgcctccgcgctcaaagtacaactgcgcctctgcgactggaaacacccctgattggttgtggggaagctgaggacgacccactcgtcgtgagagtttccgaagtctttctccagttggtgcaagccgaagcgccggctacgttttccagtaggagagtgatctccgttccgctcagtgaagaaagcagcgtcgaggatctacaagaaattgttttccagagttgcttcggtgatttaccaagccacatgattcctgccaaacttcgagtgtacgaagacctcaaggcatgccaagcaaacctgcctctaaacgtttgggctacattaggccatcgaggtcaaaccgcggacaacccactctgtgtagtggttcctccacccatgcatcctgatcaacacagtcgatttgaagtcggaagtgcctctttctggacgaatgagtacatggaggtgaatccacccgagcttgtttcgttttggagcgtgtgtgcaaaagattctacccagattgatcaggataccgtgcttaacctaccagaaggagcgtatcttctcggggatccgacacttggctccaaggtctttcttcgtcgttgttactcgaaactgttggatatcggaatgaagacactcgacaaagacgtgaagagctacccgcagcttttgattctcgggaattctggtgtgggcaaaacgttttttggctttgtcctattgaggtttcttgctcgatctggagcgactttcgtctacgaaagtgcaagtatgggcgaccggattctgttcgctcctggcctggtggttcgaggatctgatcaagatttcgctaatattctccgaacaccgacgacttactacatttccgatggtgggaagccaagccacaacccgtgtatgacggtttggttgacgacgccgcagtattcagtcagctgcttgtttgggagagtcaacgctctctacatgccaacttggtcgaaggaggagattctcaagtgccatgaatcgctgtattccagcaatattcctatcaagaaagtcgaggagtgctatcaacgatggggtggcatcccgcgctatgttctgcacttagctcagtcggattcacaccagcggctgctccaggaagcgattgggagtatcagccttaactctctaattggcgcgtgtgtaaagtttatgcaggatgactactacgagttgcacgggctgctgtactatcgtgtcaacgaatgttatggcaaggagagcttcgtgtttgcatctcgttacgtacagcaagaggtctacaagcacctttaccggcatgacaaggatgatctgttgtggtttcttgggaagtcgcacgtcggcgctcttgctacgttgcattctcttcttgtgagcaaagtgacttctgggggataaactcggaagaaagtctaatgccccagcgaggtgatcagggcccgaaaagatttggaataaacttgctgctgccatttcgtctggatcaccgttagctttagatatgccatgctcctttaagaaaaaaaaacttgagctacactcgattgatttttgtagtaaatgtagtactgtagttgatatagctttctaattgcgataacagttcatgtgttaactttaagaactctgcatcgaccttttcgtcgtattggtcgtgcaagactacacaattcgattttgcagcctcgacctagggtccgcatgtgcgagaagtaaagtttagtcgtagaaatccaatacctgcagacccaaaacaatgttttaatttctaaaaggtgcaggttccttttgagacggtttcaaacgaaatgatgcttaggcgccatttggagttatcgagataatcgcgtttgaagttgaccaatcaattttcggaaataaccggacatcaaattttcgaaagtgaaaagcgcacggaaaaagcttaaaaccactcggaatcgcttgctgttagcgcgagctttccaataatatacaatacattaaaattgaaaaaaatattgaggtcacacgtcccaaataaaatcgtgaatttagggggtccgaaaatggagataatttttctagaccgatgtcactccgcgagttcttaacatttcaaagcattcgatagcttaaacgaagcacaagacacgcctctgtcgattgatgcggttaaatcgcgattcatacttaggttcgtaagcatcttttcgtttgaaaccgtctcattttgtctcgaccgtcgccagctttggcattgtggatgtatgattgtcaacaagttagaaatggcgagacagctacatcagaagggcttggcgaacgttgtggcgccgcactacatgctatccagtgcagtaaccgttctcgaaaaatgaccgtgattcactatgggtctcctcgaaatcaatggtcgtaggcacaaaaccaacggtcaagccaagacgaaagcaataccgcacgaaacgaatctaatacacacggccacagcgataccgctaccaacaattggttgcatgaacaacagaccgagggatgcgctacctctgtaattaatggagctgctcgcagtctcaaactgggtggtcttaattcgctccagggtaccgctcggaagattgtacatgaataacaaacttcttgaaatcgtacagtgattgccgcaaaatccgagtcgaagaatggggctgtgaagtggctgcacaggaatccgtatgaccaggccttccgataatagtatttcagctcatagttgaaattagctattggtttgaagctggaatctcgtgaaataaattattgtagtggtatttatattcgattatatttataatcactaggaatgtgtaaatcgcagcacctggtccataataagtaactgagagatttttgctatcgacgggcaataaattattgagtgggaaatattgcatgcagcatgacttcggcgatggacttcggcccgcttcctgtcgtgcgatggctccacacgcgaaggctgttcaagccttgctataaacactgcgacacttcgcgggaattgtgagttgctgttgtttttcaactctcaatgcaagcaagtttgcacggcagagactgtggcaatggctcgcaacacgagcgaaacagggatttatgcctggattctcggaaactaccctcgatttcggcggggatagggtggtgaatgaaggatacttcatgggttcaagtgaatgtttccatgagttgtggaacgtctgccatttgtggttaatgaacgctttccgaccagtttgggggcaaagcagcacgttcttggttatcgaaggcaagcctcggggaagctaatgagtgagccgagctgaggcagcctagggagtggtgtggtgggtctaaaacctaatggcgcacgcggcgtcgtgccggtgctccctgggtagcttgtgtctgagaccgcgaatggccaggcaactcctccaagaacgactgctatttctatcctacaacagccgggtcagaaccgtgggttgagcccggttgccagctgacccgcctgcgacttgacggcttgaagttgttggtcgagttgcacgtcgaccacgagcgccgaggtcctctccttcttccaggaaaacttaatttccgtcttcgccggaaataccgaattgttgccgtacggtctttagtttcaagtagtatgtaccaaggggagtaagatttaaacaaaaatatgaaagacccgctcacttgttcgctgctccgtccatcgcaacgacggtgcatccttcgccgcgatgttcatgcaaccactggacaacatgaaggtgccctcttgctgccgctccgtccatcaccgttcgtagtgaagtgcagacatttcacaacatcgagatagccatagacagcagctccgtccatagcgccggtcgtgcatccttgcgacgtgttttcgtgtagccactggatcacacgtagatggcctcctattgcagcaccatccattgcgcgacttgtgcatccttcgtctcgattttcatgaagccactttaccacatccaagtgaccattagccgcagcgtcatccatagctttactcgtgcaaacgtgacctcccttacgcgatccatccctgttgcgcttccgactatctgcgttaacgttcatcgtctgcactaccactagtacgttgagatgcccacgcgcagcaatagcatccatcggggtttcatcggtgggtgtctgttgatcgccgaaattcagttttgggtactccgccaagagccattgcacgacatccgcatgaccattctttccggcttcgatcacagtgtcgatggtgaccttggcagccgtgcacgatccaccgagtgcctcggtcaaacgtcgtaactgaatcgcctgttccaaccgtgcttcttcgcgttgaagagtgctcacaggtgtcagtgcccgcgcccaaagatatgttgctacttgtagatgcccattcaccgccgcaacgtgaatagcaagactcgcctcacccagatcggtgatgtgactgccattgcttcccgcgtccaaatcctgcagccagcgcaccatttccagtgtcctctctccgccgccatcagcaaaaccccaggattatttgtcaccacgcctcgcttcttctgcatccacttgagcacatcaagacgcccttgagctgccacctcgtgcactatattgtgtccttcggactgtcagcaccaccatgagacgtcagccactctgttagagcaatgtctccgttcttcacggcgtagtgaagcgccttatccatgtcgtatccattgtccggtgtgtgctgcagtagccaccacatgacgttactgtggccatgcagtacggccacctccagcgcgtcagggccccagcagactcaatgtcccacaacaccttgtatcgtcatgtcagtcgctgcatgaacgacgtattgtcgttcgaacggaagaagtccaagatttcgatggacccgacactggcggctgccgccaccacttgaccctcgatggagaatctgggacagccacatgaccatcgctagatgcctccgcttcaccgcctcttgcagggaccggttgaactggtactggcggtaataccggtcggttccaaaacatcgaccgatagaaaagctgcctccttcatttgtgataagctttagaggcggcccagatgcgctccagcggtcgtagagactcgaaggcgcaggcctcgtgcagtggcaactcgaccgacgagtccaggaactccagttcctggactgagtgagggtcggaaacaccgaaaaaatggatgtcagcaccgaaaactaggggtccgccatgtgccgagttggggggcggaaacactgaagatttggaccccaacaccgaggggttggtgtgccgagttacgcttggggaataactcggcactgggccgagttgcactgcaactagaactcggcgaagtgccgagtcctaatcttggcatttatgtgcctcccgataaaaatatcacgggctattcagtctgtatcagtctgtagtttgctgcagcggtgtaaatcaaccttcgtgtggaggtgcgggatggcacgaagtcgacgtcctccttggacgagtatttggacacccccaccaaatgcagaaatccaacgagacgcgtgggaaaagttcatgtccacaatgtcaagtttcgccaaaaggaaaaacaattttacgaactgttgagttggtcatgctgtccgtggagagaccgatcttgttgccttgcctcatgacatgcggtatattgtgacggaatgtagctcgtcacgatgcaagaatagtctagccaagtgccgctgccgctacaaaatcctatgttgtgtggtgaactatgcggcggtcgtttttgtcgagggtgctcacaccatggataactcggttctcgcatctccaagggaccctattctcacagcagaaatgaaatcttacattggagccaagctaggagaggtctcagccgtgcttccatacgtcctagtttctcttatctgtgacaaagtttagaccggtgattttcgaggaccgtcaaccaagcaggaccaagtcaaaaactacgttaagcgctggcgctcgaagaatcgcgatgactctatccaaccggtcatcgagttctgcaagaaagccatgtacgattcagaccagtccgaccggagacctgacgacttgttggttctctgtgactacgagataaaagaaggcgagcgagtacctcttatatttcagccatccttgcttcttgattcgggggcgtgccatcaaatggcacaaacgaagaagttagatttgaagtgcctccacagccagggagtggcgtgggggagaccccaatatctcacttcaaagcaggctttgccagcatttcagctgccattttctccatgagacgcccgccgatccgtgtgtagcgctcaaccgcgtctgacctcccccacccaaacaatttcaccgccaaactgtcgtaacctgcgcttaatagagctgtggcgccgctgctacgcagtgaatgtgaaccgtactgctcaggattttggccagcgagctccgctgcacgcttgatcgccgtcaccacttgattgacttgcagatttgtgcatgcatcaatcttgcagagtagtgaggccttctcgatgccaagtttgtcatgatgtttcgccaaataccacgcagcgaggaccggacagcaccaccgggcacctgaatgttgcaatctgcgactggtgccgctcccgaactgatcagacttgctcccacggaagtgtatcactaccgcaggtacttcttgtagattttcgacttctttttcctcgcttttcacaaatttcatgtccgagcgtcgaatcgcgtatgacttcacatttgaggcaagcgttagatattcagatcgcctcaaaagaaagaagaagcccagcaccgaagccccccccccatgactcggttctgggttgacgagaagtcgagtgattcgtgcaaccgtttgaggatagtcgccgtaactggggattttgggctgccgattgggtctgatcttcgcatctcagcgattgcgagctggtggccgggcagtagtttgacgctgtatccgagttatcgccgatgatgccacgagatctgactaacttttgagagcacggtaccggcagtgtttccaatggctgatttactccagccgaatctccagcagtaaacggcaaatggggcgagttgataggagtgctggctggggctttcggggagccatcttggaaaattaagccagtcacaccattgacaccactgattccaggttgcgttatagtttgatgccgacgccgcggccactgagcgggactgaagttgctcaagaagcccgtgtagattttcctgcaatgcgctgggactggagactgtgtccaacacgacgaaaagttagtccatcttgttagatagggttcggcccacgcacgtgatgcggcatccgccatccagtttgattaacccgcgatgtgctcagcagatatcctgagattatagtacgcttccccaaggccgatgcacctatttatttcttggctgaactggttccttgcgtgaagtttgttgcaccaagtgacgacagaggtgttgtcactccagcatctcacttgcaccagtcgaccagcggattgtctgttccacgttggaccccacgtccagaaagccatcgccatgcacaagtattcccttacgttgatagagaagtcggcttcggacgacaacgactccttattctcatttagtactgtagtgtatgatacagtctgtgtctttatcgcaccatgaagatggctcccgcctctcggcgagatccttgaattaatgtaacgtaggcacatttatttggcggaccttcatcagaaaactcctcgctctcgataaaccatgtacatgtaactccgtcaagtacgcggcgctagttttaacatcagcgaaatggatcgtagcagcccatgaggatttggtacgggcgtagagtagcagcttcttacagtattaacgtccccctatgctcgttgacgaatgttatgctacagccaggaggaacggccttatctgcgctcgcatgttgctacacgtacatgaactacacttatttttacgcttttcatcacgaagattgtctctccaacgtaatttctcattacgaatcaaaactgcatagtgagatcaagtcagcgaaatttagtgttttcacagcataaattgtgtgctccacgccaaatcgaatctgtgacgtgtgagaatctggggtcatcaatcagtcttgaagttgctggccgcgcgccatgccaactcccactcattccgcaactcgccgcgtgcctttcacgtccagaagacgaagaagaagacgaagacgaagaagaagatggcgaggctgccgaccccggaccctctcacggccgtgacgctggtgttccgttcgcgctgcatccacgcctccgccgccctacggccttcctggacgctgcagtggagatggaactgtgcaaggcctgcacgttcaactccctccgcctgctggaccgcatctgggactcttcgctaccggaaacgcacccgtctccagcggaagtgggtccgggcaacgggggctcgtggacccgacgcaagtatctgcgcacggaccgccactaccgccgcttccagttgcgtcgcgccatcgtggaagctgtcaagatcgaggacgccaaggccgcgctgcggatggtgcagtggctctgcaccaagttccacggctgcatcgtccccgtcaccgccgtccacacagctgcgggcaaagggaacctggacgtcttgaagttcttcaaggcgattgagatccctgggaggagggacggaggcgcagccatgagggacgagatcgagaacgacaagggccacgtcgtccgttgggggcgtcacgatatggagcacgccgctgccaataagcagtacgagaccactacgtggctctaccagaacacttgcgcgcctcgagccatgaagagcacgctcatgacggtggtgcaccacggagacatcgcgctgctcgagtggtttcgtgctaactatcgcactctggggttcgacccggacacggaagaggaagagtacgagctggcggaagcagatcgtgatcgtgaggacttggacttatacgatgagttcgggttcgggaacgaaggagcgctgacgggtgaaaacgtgggggagctcctgcgaggggaccctgaggagttcatacggacggcagtgtttgccggtcgtcttgacgtcttgaagtggatggtccagaatggctacgtgaacaagtcgacgtacctagcggttcgccccgcggttgagaccaatcgcctcgacattgtggagtttctgatcagcaacaagttggtagaggccggtcgagctctgaggctggatatacgggggcaagtttgacatggcaagacagctgcacagcaagtactggaccagcatcgtgtcggcgcactattatccagtgcaatgcccgttctcgaaaagtgatcgtgatgcactgtgggtctcaccgaaagccatgatcgcagcgattgaacgcggtaacttcgagtctgtacaatggctggtcaccacgttcggctccgaattcaacttgttcggtgctagccaactgagtttgtcggagaagaaaaggatgagtcttgacacggtagcgcgacgtggagaacttccactgctcagatatttacacaaaatatcggtcggagccatcaccaccaccaaaaccaacggacaagccaagaagaaggcaaaggtatcgcgcaaaacgagcctggtatgcacgactgcagcgatggaccaagctgttgctaataaccatctcgaagtggtaaagtggcttcactccaagcggaccgaaggctgcacgacgcgagccatggacctcgcggcagcaaatgggcacttgcagatggtgaaatggctcagcactcaccggtcggaagggtgcacggctgcggtcatggatttcgcagcgagcagaggacacctggaagtcgtggcgtggctgcatcacaatcgacccgaaggatgcacggtcaaagctctcattggggcggctctaaacggcaatctcgaagtcgtcaagtatcttcaccgacaggtcaacgctcagtgcacggcgaaagcaatggacgctgctgccatcaagggccacctggaagtcgtcaagtggctgcatgcaaatcgaaccgagggctgcacaaccgctgcgatggatggagctgctcgtaattgcaagctggacgtcaccaagtggctccacaagaaccggtcggaaggctgcaccactgcggctatggacgaggccaaaacgttggagatcgtgcagtggttgcaggctaatcgagttgaggggtgcacgaccaaggcgcttgatcgcgcagcttccgatggagactttgaccgcatattagtagtgggtcatggaacattacgccggcagtttttttccttaccataatttaccaccgagaacattcctgaaaccttctttcgggacagcagcgatttcaacgacgacccctctcgaccactcgagagcgagagccacgtcttttcgatatgagggtagttttagaacctctgaaccggtcagatctaatagacgttgatttgacgacgcccactttatagcgagagccacgtcttttggaccttacggcgtttcgggaccgctcgttcaaaccacattgataaaccaatagaacattacgccggcagattttactagtagttcggaccagcgcgacgtggcgtctcatcattggttgaaaatctatgtcacacaccttcatgttcgcttaagtacgccagaaattctacctcctcattccagaatctgccggctcgaggaaagatggtgaagctcttctgcgcgatcgttggcgtggcgggcagcgcgttctcggtgcgagtgaatgagagcgacacggtggacgacttgaaggacgcgatcaaggcgaagaagacgaacaagctgaaggacatcgatgcatgtgacctgcagctcttcctggcgaagacggagggcggcgcgtggctcgtgtccgactcagaagatgtgaagaagctgaagaagggcgagaagactgtcgcagttgaggctttaacaagcgaagagaaggagctacagggggagtctggcctgcagaaagtgttgaagggcatgcagaagccatcaacggaccagattcacgtgctggtgaaggttcctgagcaagaacacgcacaaactggattgtggcttgtcactggatccgttgacaacgcgctgaacacgaaagggattcgctgcaaactgtactggatggcgacgttacgcattggatactacgatcctacgcgctgcatcggcaacaagaatgtcgcgttttggtatgaagacaagaaattgtgttttcatgttttattcgagacaagtacgtgcttctatatgctgtcgctgcatcgtaatactgcttcattgagggctaactctgtttcttttatagaagatgctgctttgctgttcgaaactgacttaaggactgggccacaaacgctgggctctccgttaactaaccaggttgttgagacgcgtgttgcaccagctaacgctgtgtctactgatctccagcgcgtcttctactgcgactacgttccagacgattcggaatctcctcaaaacacagtttcatcgatatcgttgactacaagcgtttcgaatctggactcatcgactgacgagtttcgttttcagcggattgaggacgcgaagttcttcctaccgtacggcaaggcagaaagctgccatttggtgtcgagaaagcaaagcagagaccacaaacgggaattcgccaagtacgatcgcgactcaaacaacaggcttgcgctttctcgcgaaatgcatggttggttcgacggtatgagcattgaggttcccatcgtcaacatgctacccggatctgttgaagagaatcaatccattggcaacagacgcaaggtactgtgtgagcgcgtagttctggtgtgtgtaagtttactgacatttgcgtgtaggtcgaggtcttcgtgaaggttctggatgctcagtgcacagatcgcgttttcagtcgtttgaaaggaggatcaaccacgacggacgatccgctcatgatgaagacgtttgttcacgtggaggatccagaaacattttgtttgtgcatgaggtggaagcacgacgataatgcggagcgttggagaagcttttgggatatgactcctgcggtcgattgaatggaataatgtggctcccgagttaaatacttcgaagtagtatttgatttcttgacatactttgatcctgataaatataaagttagtaatatacaaagatggcgtactctcctgagcaataccaagctagcaaggaacgaatcaaagcagcgcagaagcgctactaccagcgcacacgcgaagcccgtttatcttatcaaaaagacaacgatgacaagaacagagaccagattcgagctcgcaagcgtaaacccaacaccgaacttattgatggtgaagtcgaacttaataatgaaaccgaacttaattaattaattaatttttttcctcggataaaaagtcgcctatgatataaagtcaatcctgatacaagacccaatattataaagtcgttttttcggagaataatatagccaccgatatatagcaatgttcgcatacgagcttgaaggtcttaagagattaaatattaacccaatccgatggggtagcagctaccgtattaaggtacgtggcaagacggggcgcatggtatacattagcaacatttcccaccccatcaaccaaaaatttaaaaatttatgtgttttaactggacgttctaaaagtatttatcgtttatttaaaatttctagtattacattaaaacttttttttacaaattgaaactataatttattgaataattattttttttatttttttacgagtaggttttcctttagtttttttcctgtttcttgtaaacttttttcatctttatattttttaatcaagaaattcattaaaagctatttttaatgtacattctaataaaattgtttaatagtgtttattaaattattaatcttattttgaaatttttttaacataaattaaaattaaaaatttcagaatatggtctttatttttataattttttaaatagaaaaatgtattttgataaaattaaaaaaaacatttattttaataaatataataaaaaagttcatacgaggaaaagccatatctggagcaccaatcattaaaggaaatgacagattgattaataaaaatggaaatcattatttatgaaaaacgatttagtcaatttttggttttaaaataaataataaactgatattccgtataataccaagcataacatttttttctgaataatatttaaaatgatgtattaaagattccatagaatttttaatttgagttctatttggatttgtaatttttttagtgtatatcattatgattttgagtatttttgataattttattagaattaaaaaaaatggacctttatatttacttctagacataatttattgaataattaatttttcctaaaattggtagcgaagcagtacaagatcagtctaggcaagctccaaaagaatttggctgctgatttcaaggaagacagtaagtaccgcttctaccaaggcaaacacatggagtcgcacctatatgagggaatccagcctgctgacttctacgacaagcttgagaacgtgcttgcaacccagaagtctgccttcaaggtcaacatcgctcttggatacaagcttgtcagcagaaccgatgacagcgagactcgctacttccacccgaatattagcaacacgtctgtatttagcactcctgtagctatcaacagcaaggctgatattcgtaagaaggtgatctcggagattcgctccatggagttggctgacaagctcaactaccccagctccgggtacatggtgaaggggattactggcttcaaaatctatatctaccaacgcgaccatgctctgggtgatagcgaggctgtcattcctaaggcgattcgtaataacaagcacgtcatcaacttccccaagacgaacaacaagtgtgtcttccactgcattgcttatcacaagcaggagggagccaagaaggatcctcgtagaatccaggctctggtgaaacaagccttcaagcagcactgttcgtacaaggagatcacctacactctgggtctgttccgcaatttcaagcctatcgacattctccaattcgatgagcttgaggagtgcttcaagctgaacatcaacgtcttcaacatggatgttgagacgggcaaggttgaatgcattcgctgctcggacaaggactatgattcgatcaacatcctgtcgcacgagaatcacgctctctacatcacgaacgttgatatgctccagcagaagtaccaatgctctacgtgtgagatggtgtttgttagctctgataagctacgtaaccacagtaagaaccaatgcgaactcgtgaacatcgaatcgttcccagctcagccaaccatttaccaacccgctccgaacagcattcgttacatgctgactaagtactccatcaaggatgctgaccattacatcgatcacttcattgtctatgattttgaggctatcctcaagcctacgggtgtcaaaaacggagaggatactatcttcacaaacgaacacattcctgtgtctgttaccgtggccgacagcttgactgaggaggtgcgatgcttcgtcagcgatgacccgaaggagttgctcaaggatatgttccagtacatcaaggaagttgcggctaagattcagcagtacaacgtctcgaagtacgagtctttgctccgcaaaatcatcaacgtccatggtttgactgacgctgaggttcctggtctagacttgggtaagacgtacaagatggatgatgtcaatgcttggattcagaacggggagtttgcttgtttcttcgatttccacagcaagctcgcattcggtaagaagcgctcggattatggcaagctgaagcagtgcattggtcaggtaccagtattcggattcaactctggaccctaagacatcaaccttatcaaggcggacctgtttacagtcatcggtactaacaacatcacatcagtcatcaagaaccctagctacatgtgcatcgccacgtcagacatgaaaatgcttgacattagcaactatgttccggcaggcaccaactatgcaaactacttgtcgacatatctcggtgagggcaagtgtgatgacaagattcgatgcgtctgtggcctaggaaaaggcatcttcccgtacgagtacattacttcatttgacgtactcagtcagccggaagtccctcctaagtcggcgttcgacagtgctcttcgtagcactagcatcagcgatgaggactatgtgcgggtacagttcgtctgggaacactatggcatgaagtcaatcaaggatctactcatttggtacaacaaccttgatgtagtacccttcatcaaggccatcaaagcccagcgagaacctagaacacctcaacgacttgctagagcgacaaaagtacgtgtgtgggctatgctacaagcaactcacagctgatactgcctcggctgaccgaatcaataacaagctcggacacatcgatggtaatatcttgatcagctgtgtgggaggcaacgttgctcgcaagaacatgtcgctaaagggcttccgccacaagaagctacttgaattcaactcagacaggttggtgtacagtatcgatagagaggagaaggacatctacaccaagatgaaggcgaacattgctggtggtccttctatcatcttcaacagatacgcgaaacgcaacgagaccaagattcgagggggtaggatctgcaaaaagatcatcggctacgatgctaatgctctgtatttgtgggctcttggtaatgagatgccatgtggacggttgactaccatcgaagcatacacagggatcgtcgatgatattgtatatgacaagatctttggcttcctcgagtgtgatatccgtacaccagagcacctcaaaccctacttcagtgaaatgaccccaattttcaagaacaccctcatcgactgcagcgatcggagtgtcatcggtcagcacatgttcgagtacaacgaggagcgcaagcaaagccgagcaaagccggctcgcaaactcatcgggagctactttggtgagaagatcctcatgctactcaaatggtacatttctcatggtatggagatcaccaagacttacagcttcatcaaggctagctctcacaaggcatttgcaccattcatggaagccgtatcgagcgcgcgacgagagggtgatgaaaatgttaaatccatctgtaagatcattattgagaaggtatctgacactgatatggatgatttagtccaagagttgaaaaaaatcattacgaacactaaatcatttgatgcgctcattatcgatagattcatgaatgaatcgacaaccaatcctaagattcatttggttctagacttgttgactaagctgaaaacgcttagtgagggtagcaataataaggctatgattgctgagatgatgaaactggttggtaatagtgcgtttggtcgatctggcatggacatgagcaagcacaaggaggtcaggtatgagtcgaacgataaggtaatcaaggccaagattgagcacttcaccttccatggaatggaagagctgaatgattcatgtgaattcactatgatgaagcgaaagctcaacaataagaacccaattcatctatcgattgcaatctatcagctcgctaagctccgtatgttgcaattctactatgattgcattgacttctacttcgaccgttcggaattccagtaccaagaaatggacacagactcggcttatattgcgttcagctgtgagaagccattcgttgagtgtatcaagcccgagcttcgtgagcattttcagcagcataagtacaagtggttcccacgtgattatagcgaagagatggctcagcttgatcgccgaacgccaggtttgttcaaggttgagtggtctggtgatgctatggtatcctcgccctctaagaagtacatttgctacctaccagacgaatcttacaaggtcaaggtttcagcgaagggagtccagcagagtggtggccgcaatggcgacgtcctcaacccagatggctttgaatcagttgttcgcgatcgcatcacgctacagggcaccaacaaggggtttagactcagtaaagagagtaagtcaatcattacgtacacccagactaaaacagtgtacttgcggatggtatcaccaccgaaccgctcgacatataatcaactacctggcaggggatttttttgttttataaccatatagagcgatggatcagctgttgtccaaaatatactatgaccccaaaacgggctatgtgggtgcccaagccttgtaccagaaggctaaagaactggacccgaagattacgatgaaaatcgtcaaggaatggtactcaaaccagagcgacattcagcgatttcaggagcagaagaagcgatacgatgggttcaaaatcgcatcgactaaccccaattcgtggccgatggacttggcgttttgggagaaaagaccaatcttgactgcgatcaacatcaactctcgcctaggctacgcaaaattactaaccaacaaaactgacccgaccgtactagcagcaattagggtttttgtccgcctccataaggttgacattctcacaaccgataatggttcagaattcatgaaccaacaggctcagaaattattcaaaactaagaaaattgactatttcaacaatgagcctggagatcacgccaaaatgggtaaaattgaacgcttcaatagaactctgaagcagcgccttgtcaaaatcgaaccgaagcgactaacccagaagctcatagctgctgttattgagaactacaatagcacgacccatcggacgattggtatgacccccgacgaagctaaaggtaaggtaattgaatctgaactagtccacaaccaggctgaagccgagaggattgaaaacgagttcgaggtcggtgaaaagattttgtatcgactaaaaaagaaaacatttgataaagaagcagcaagatggtctaaggctgtgtattcggtggtaggtattgatggctaccgcatccaaatcaagtcgaaaaacggacacactctttacaaggggccaaacgatctaaaaattgttaaagcagaaacatctgaagctactatcaacaggggtgatattttagaggtggagaagatcttagaccacaaaaagatgcgatccggcaagtacaagtatctcgtgcagtgggtcggtaatgaacttgactcctgggagccacaagataatcttggattagtcaataagaacaagagatcaaccttagagaatgagtactggaagtcgataaaaaatgagtcgaactagcttcgaaataagtttaatagagcaatcctctgtaagcgttgactcatctatatctatcaatctatactccaaaaataatgcttaaaaatatatgacttcatatatagaatgtgttgcaactgcgtagagaatcaacgtgagcttgtacagctccgaagaaagctgtggataattcaagaggttagtcgaatcaaaaatgaactcagagatttagacccagtagccaatttccggaaaaccgtgtgcaatctacagtaccgcgaccagttagaaacgatatttggtgtgccgtttcattgcatccaggatcgatacatcaatctcctcaatgagcgaaccgtatctgtcatacgtatcaaccatttaggcatgactccgttatgccaagctattggtgagtatgtatttgatcgatgctaatatttttttatgactaccacgatatagttagacgatgtttcccaactttacatccctcgctcaacgagagcaaaagcggcaggagctactcgaacgaggtgagcgccgagttcgtcaagccaagtccaagcgccttatgtacgaaggtgcatcatgggctagcgatatcgcgaattgtatcactactgttccaaagaaatcaacacaatccgctcagtctgatatttcggttggccctgacgaggctacgccggaagacttaaaaaaagtctgaatattgaaaactcccaaaaaaaacctgagtcctcaacaatggtagatgctgaagttaatacaacacctgaaatgaacgatgcatcgactactgcaaagcctcagtccgttgatgcttccagtactgctaagcccaaaaccagtgatggttgggtccacgtgagccccgatatgactgatgttggagttgataatagtgcaagaatgacagatgctggtgttggccctgatagtccactgccgcaaaagcccgtcgaagaagatttgttcgacgaaggcaatgctgagatgaaaaatcaaacaaagtcaaaggaagcggtcgctaaaatcttcgaggtttaccccatccttgcagaactaaatattcaccctattgcttccaacggccggcagcttactaagtattatattgggatggatgctaaggtgtacagtattaaactgagaatatgtactagttccgagcatgagacgtatgaccatattggtgaggtattaatttatgatgtcagattcctcgcatacgtcaatgagaatgagcgacgtaatgagatgggtaaagaggacaaaaatagcccataccaggtttgccaaaatattggctaaaaaaaaaaagaatcaatgcctcagaaggagattattcaaaccgctctaagcagagacttgacgacagttttgtgttcgatactggaatatccacaagatccgatcaaatggacagcaagctcaaattattttggacaattagcaaaaatagggaagtccttgaatctaacggattgataaagaagattgtatcttaatggttccgcaaaatcttctcctattgacaaagatggctatgtttggatcaatggcaatagcattagcgtttacgggaaagatagcgatcgtgtgaagcaagcaatcactcagaaagtgaactggataaatacattccaatctttcattaatatgactaaagccaggggcctcgagttagaactagttggtagcaatgaaaccaaacacataaatgattttgccccagctaatggtgaagctcagcatgggttaatgagtggtattgatgaagacatggacccaagcctatcaaacgctgataacgacgccaagaatatcttaactgattactacagccagttgcacgctaacagtattgatattccatttcggctacaaccaatcgtgaaaattaacggtgttgttaagtcccatccatcatactactttgggcagccatcggggtctagacccctaaatattttaaatcgtgaaaacaaagcacacaagcaggtgagtggtgtagcttggaaggggctaatgaagaatatcatgtggatggataccttttcgtccctactcaacggggttgaggacttggaccgctatcttaatgaggttgaataccccttcccatcgagcgatgaagaagcagctaagatacttgaagaaaaggagcttgataagaaaagacgcaaaaacctggatgctaatcttgaaatattgaatgaggctattctaaagtctgtacacgatattagacagcaaagcgttgaagagtatgaatacgatgacagcttgcaaaagcttcatgatgagtcagaagcagcttttcagacatacggtgaggctcagaaacgctatgaagaagcaaaagaggctgttagagggaataactcaaaagcaccgagatcggtgttgaaggcagctacatcagctatgaaggcgacaaaatcgatttatcaaacgaaggctaagcgatacgccgaggcaaacgaggtatccggcagtggcgttaaacgaaagcttcaaggtcgaggattgcgcggtgcaggtgttgccccgctggaaggtgtagttcgccgaggccgtacctacaatctcaatgagatccaaggattagcaacgccgtcagcctacacatacaagcagagtggaagcaagtatattcgtatccccgaccttggtgctaaaaagctcgtgatcgttctgtcgaatcggcgtaaatgtgttcctaagtgggaaatcagtgatagcctccaagccatgatcaaggcacttgtctataagaaccgtatcgatcaatccgcttacgataagctcagcgttgaagataagaaactgttcaaggaggttctattgattactcatctccaatacagcttccacgataagttagaggatcctctagatacgcttagggctgaatacgataagctaaaaggagagctacaacccggaaatgacaaccccagtatcatcaagcagctccagtctctcacggtggatatgtacagcattcgactgattgatgataaagtgttcaaagatattatcacccgtttataataaaaccatgttcttcttcaactcgcgcattatatccagttccggaggcagctatggtgacaatagcgacctcaacgtcgctgagtagaaagctaacatgaagaacctcatcattcatgatcgtccccacaagacccaagccgctgtgtgggctactgacctcgacaagtcgacgaagaaggtggaggcatctacccaaacggaaggcggccgagtctgggcttaccagccaaaaaaaaagtcaaagtctgtgaagacatttgctctatagagcagagcggatatacttagatgtctacgtctgttttcttctcgcgatagagtctgatttttttaatctccgatatcgatagccatgacagcattcttgccactatgtacgttgtacattgggatataagcattattccctatcgaaaccactccagcgtgcatcggtattgaaccgatgacttggccagtttcagggttagtcaggttctttttgatcgttttacttggtccgcagcccatgatactctattacaacgaagtactcaagatctgctctatatttattggtgcgaaattatccctgagccaataccatatataaccctctcgtggaattcgacaattcgatcacattgtagttgatcagtatcaacgacattaacgttagtagtctgagggcaagcggtcttcgccacgaactgggtttgacagataccattctatatttactcagacataatcgctctcaactcattgagttcagctttgagattattgatttggccttgctgttcttggatagatttacacagtaccgaggttaaactggcgagatcgattccccatggattcactggaaacccatccggattaagctcatcgtttgctccgatatctactgcttctggtatgaccttatacagctcctgcgcgatatagccaacatggacagtctgctcttgaaccatcctgaattttctcggtctcattctcataaggcttgccaaaccatagggacagtctacaatgtccgccttcaacctctcatcgcttgcattggtatagcttcctccgcgcaccgggacataggctgtccacgcgtaatttgcatcgcattttcccaacctgacagctcctacggttgaatcagtaccaatcagtctgagaccaattgaatcgatacctagcaaatccatcgccgcctccctttacgtgcatgaaattattcgcccatacctctccgcctgagtgaatggttgcttctggcgaccacgtactcataccaactcccagtcttcctgagttgtttagataagcttgagttgtgtttccaaccatgaaccttagcgggtcgctcgtagtggtgcctagagctacaccactacttcctcccgcgacatcgttgcatacctaaatttcaaattcgattggagtagtagcatcgttggctatacgcattgcgcgttgccaagacccgcttagtaaattcgcgctcgaaactatatctatttttgcagtactggtagctgatccaaagcgaatgtatcctgcttgagtgattctcatacgttcagtcattggtgataatgcattagctcctgaccgtgtactgattgcaaaatcagccattgaatattgaagattcgtagcggttctagtacaatatcgattaacgctaggggtgtacgttgtcatatcactagtaccttcaatcgtgaacgataatccggcctgagcgccaaccgtattgctttgattacgaatcatgagattaaaatcagaggcacgcgttgttgatgtaaatgatgtcccggccgcaatctgacattgggtagaagtagtggatatcagattggttgacgttagagatgagatacctgatgagatgctactattagagtctagtacaagaacctttgatgcttctgcagttcctgctccggtggtaagatctagatagttctgctcaacggtagatgctgtgcatccagcaagcttgttcagccccgcacctgtagcattgagagtatctcctctgagttgaagcgtagtaggattgatgttcaaggtcgttgcattcatagtttgagtacctgacttactaatcgtatcacatgtgttcgtaggcgatgatattgaagtcgaagctataaagtttcgtgatatggttagatcgcgaatgcctgagtaatctttcgtactattgagaaccacaacgctactggctgaagcgcccccgtcgataacattgagaaagtaagcatgattgaaatatacccaagaactgactccatcccaaaaattcagattcggaatgaataaaccggttccaccagcgctaagggttagattactaagcgtacctagactagtaatattaggctgagcagcggtttgtagcgttcctgttatcgacgtcgctgggagcgacctcagggttcctaggctggtaatgttgggctgagcagctgttgttagcgtacccgatatattgcccgagccatttactgcggttagagtacctaacgatgttatattaggctgagcagcagtttgtagcgtaccagtaatgttagttgcagttagcgagctaagacctgtaatggatcgacttgcaccagtaaaggttaaactgcctccgatagtcaatccagtaagcgtacctaagctggtgatatttggttgagcagccgtcgctagcgttccattgatgtttccactcacggtgagcgacgagagtgtccctacactagttatgttggagtcgccaatgtaccagatatgtttccactcacggtgagggacgatagcgtgcctaagctagtaatattaggctgagccgctgtctgcagcgtgcctgtaatcgacgttgccgtcaaactactaatagtagcaatttcacctgatgcaccaagcaccagagctttgttgatagcggcagtacctggagtaatatcagctacatacgttggtacgcctgaaacggaagcaccattaacagttaggctactacagcttagtgctccaagaccgctgatgttcccaccacttccagggacaagcgctacaccaggtgatgctacgccttgagagacaccggtaatgtacgtcaagcgatagtcatacttgttcagataaagagtctgagcatagtcatacgttagaaacccgctggcatccaattggagaaaggatgccggattataaatcggcgatgtgaatatcgggctaggataagaaaaacctgaactcatctttgttcgatcctatatagtttagacgataatcatgagtagtattccagatttcggagcttcaatccctaaaaaatttcaaaagcgcctctatgggtgatattccagcacttaacatcaaagcgctgtttggaatggtggttctggggccatcgttctcagggaagaacaacttatgtatgttcatcctcaagcattctcctcacgtatttgctcatctaacgatcattgctcgtaatcctcaccaggagttatatgagtatcttcgtgataagcttgatggctttatcacattcgccgaccctgactcgcctccgagtgttgaacgggtacgtcatacaccaattaattccaataagcctgagttcgtcatcatcgatgactacagcaacgataagcttcttcagaagaatttgttctcacattacttcactagagggcgccacttcaagctatcaaccatcttcttgagccacagctacttcgcaatggacaagatgatcagattgaactcagagtacgtagcgatcctgaaggctaattctaagcgagacctccagatggttgtgaaagattttaatatcaagggagtagatgagcgttcaatcgtctattattaaaacaaaggcacggagcgaaagggccaaatgctcttcattgattcaatcaatggtcagatcaggtataacttcgatagaccgattcgtatcgagaactaattccaatttatcaaacaaaaatatgcctacaaacaaaaatcaatatgtccagcattatcaaactcgacagcaccaatctggtacaagatggaaccaattcaacctggaaatactcctttcccggatcggcggctgacttccgcgatgtagtatgtgccattcaatcgatttcgatgtataacagcgagtataacattgattcaatgcaatttcaaaacacaacgttcaaaaacgaattacctaccgctgcaactaaatccacaatcagtgtatccctccctgatggtatttattcgtatgacaatatcaaccgaagcattcagactgctcttgtcaatgctggggcgtatctaatcgatccgtcggggaataacgtattctatatcaaaatgagtgcaaacagtatctattacgcttgtcagcttgacttctctcctacgcctacaactctaccaactaccggttgaacatggaccagacctacctccggtttatactcctctggtggtactggattgccgactactactcgcgttcctcgactgatcaccgataatgctgaattcggtaaagtagttggtctcacagcgggtacatacccctccacatcagctactgttgcaagtgctcagctatcgaacatcattcctcagattcacccgaccagttcctatatcgttcgttgcgatctgatcaaaatcgaatacgtggcttctggtgatagtgtcagtgcttttgatagaggtgatgccgctattggaaagatcatttcatacaaaccgagccagtatgcgtgatgaactgtcataatggcgctcgagctagtattacactcagtatctataaccaaaatgataaaaagtgattttcagagatacgtcggtatccatcatgcttctgattcgtccaaaaaaaataagacatccagagttttttttagggcggctacaacgtaaacgaaccaccagtcttacgacgtgccctgagcgcagccatcttagccttcatctctggcgagcccttcactggacgtttctttactacgcctacaccatagcggcgacgaacctcttttcgcacagatctgattagatcctcatgttccggcttggtagcatttgatagtaggaacttctctccagcatcgaccgcgtcggtgatgacccccttgcgcttcgtgtatgcaagagcattctttgcagccttctttacgtcagccattgatacgcgacctccttccttgttgctatcggaatcataaataccaatgccggttagggacttggttgcagctctggctggaacagcagccgttggctgaccagcataagtagcttaagcaggaaccgacgcatcaacggctctggatagtagacctgaatccttagcaaatttgtatgcagacttgatccctccccatactttggaccagatagagcctccttgagcctttttggagcccttcttcacttcgtgcttagtaatgtcgagtctgacaccgcgtccagctttacgagccttgagcgccttttcaaacgaagcagggtggagatagatgactgaaccactaccctttagttcggctgaggtgaggctgagcttacctctccataggttccttggtattgcttggtgttgtatcgatcaataccatacttctttggtggtccttcccccatactatcgaagaattcaccattatgagccgccgtccagtgtcctacctcaagattaggagggcgaagtagaatcagaaatgactctttcttggggagatgggactttatctcatttgattcgaatatattatcgagttgaacgttcattttctcagcgagttcgatgagatcatgatctgaggtgattggcttgatgaggtgcgacataatatttaattttatcaaactatattacgatccatatagattcaacgatgagcgaaactcaactatccgatcagtacttgtatcggagctcgcttaagagcgacccggagatcaaggtatcttcgagcaagcgtgtaccacacgttattgacctaaatcagggttcgtaccagaatggtgtcatcactatcgatgctacggctcagcttaacggttccgagggcttcgcaagccttcgtgatgcctacattatgcttccctacaaggtctcaatgaagaatggtggcactgctcaaactgccgctgccaatcgtctatgtgctactctaaaatgcggaaattggaacgttattgatagtctgagtctggaactcaacggaaagactatcgtctctatggctgactacaagctcttttggaacaacgttcgtgctcagactggctacagccctcagtacgttgaaaagcacggagctgaatcgttcttgtaccctgacgctgctcagtcggtatcattcagctctggatccgcatctaccagtggtgatggatattcaaacaccatggcattctcgtcttcctttgctgtctcggctcctcctggtggtgcaactattcctaatgatggtttcgttaagcgccatctatcgaatcctcctacggctgaaaaaaatttaattctgaaaatgacgtcgtaatgtgccagtaattattgggagtttcatcttaccctcgcatgtgcgatcctgcacgactacagggtcgcgcgtctagtcgctggctagcggacgcctcctcgagctctgaggtggttgagaggtcgtgttggtaaaacggacgactatccacaaatatcgttctagcaccgttctcggaggtaaattacggtaagaaattacgaaaataaaaaactgcctgcgtaatgttctattgcttttatcaatatagtttgaacgagccccgaaacgccctaagatccaaaagacgtggctctcgctataaagtgggcgtcgtcaaatcaacgtctattagatctgaccggttcagaggttctaaaactaccctcatatcgaaaagacgtggctctcgctctcaagtggtcgagaggggtcgtcgttgaaatcgctgctgtcccgaaagaaagtttcaggaatgttctcggtggtaaattacggtaaggaaaaaaactgccggcgtaatgttccatgacccactactcatattgttcttccactcgcagcgcactgagggctgcacgggtgaagcgttttcggagacgcgcaaaagcccgctcttcatgggcatgcgtgaacgagtcatggactggtccaccgacaaaatccacgactggctcgatgtacactatccggatgagaatgatgaggatgaggattactgaagacttcccttcttctcttccgggcacgtctcttcattctttgaaagtacgttcggcattcatattttccctcaatttgtgtagatcaagtgaagcaaaatacacttgacacttgcttgttcgcgaataatgccaggagctccacattttctccaagtaatcttcttgagggttcacatgaaccgttgaaacaacgtaaacattaccacgctaccctacgcaattgaggatagtggctaagaatccaggcatgaatcctcatatccttgtggcgagctgccaattccacagtctccgcggtgcaaacttgtttgaactgcgagtgcagaaacagcagcacctcaaaatgcgatcgactgtgctgtttatggcggagcatgtgcagtcttctgaacgatgagtgtgaagccattgcacaacttgaaaatggccttgcagcaccgccttgtccgtcgccgctgtggtgcatcttcaaatgcccatgctctgctgctccatccattgctgcgaccgtgcacccttcactgcggtgttcgtgtagccactttaccccgtcctgatgcccattcgctgccgctccatccatcgcttgcgtcgtgcttccagcgtccgtatttcaaaacgaagaggaagccaggcttggggggatggcgggtctaaaccaaaagtgaccgcccccgcagttcgagtggatggaagctcctttctagaagcttccacaaccaccctacatctgctctatcctattatgtccttaacaatgcgaatgatacctacagtactgctacctctctaatctgatacactcaccccttcctcagatgagggctgcgtcgcttcgttctcgcggctcttcaaggtacagtcgtacttaagacatatggctacaatgccaactgaacttatccttgtcaagtccgtacctaacggtcatttctcgattggacgtgcacggcgcaacagttggagctctcgggcgacttctgtagcggattcgtcctgcgctggctggtggtgtactcccccggtcggagctggataggtcctgccagcagcaccgtcatgacggtcgagtacggtggcctcggccacacacaggctggggcgtcgccttcttcggagcccgggtcgccatcgcgggcggcccttgaccaacttgctgccgctgctgagcgcgcaccccgcgcgtccctctcttcaccgcgcgatgcgttcgctgcactactggcctcgctgcctccgacggatgacttcgacttcgacccggggctcgtggagccattcctgctgctgggtgatgacggtgttccggtgggctcgcgcggcgccctctcgccagcgccagcgcgcgcgctcgatgaagatgaaggtcctagcgatctcgtggacctggacgctctcctggctgagcccgacgacgacagcgaagacgtggtcgtcgaccaaggtagtccggcagtgcctccagctttgccagcctcggtgtccaccgtgccttcggtagtggcctcgagcaatgttgatgaaccggcgcgcctgcttcagagacttcgtttagagccttcgtcgtcgcgaccccgcggtcctacgcttcgcagtacctcggctaggcttcagtcttgcaggcctgatgttgagactcgtgttgctgctccagcggcaccgtcacggtcgatggaaacgcagatggttgtctaccacaacgagcctttgcctcgacatcctgagcgccatccgggaaacaaccatcgcaattactatgatcgatcggcgccttgggaccctaacttagtgaagtaggacaccaagccgcttcaactgtcttgggtatgggaagaacagcttgctgggtacccggagttgaaggaccacgttgacaagtgggttgctgctggacgtccctacacgttctatcggtacgcggacgaacactttggtggtgcgggtgcttcggcgactggtcggtgcttcatggaggctcttcacgcggcgtgttaccatcttgacgacccatcgctcattacggaggaccactgggaacgcttcgagaagcaacacaagcgcgagatgacctacggcgtcaagcgggaagacatggctgacttcttcaagttcttggagcgcgactgtgttcctttggactacaacgagctgttcaagtcgcggcaaatcgactcgttgaactcgctggctgatctcatcgccttcgttcgccgtgagaagctggaccgtggatgctacctcgtgtgcgccggtcagcaccgcctcgatcactgcttcgttctcgtggttcgacttcaccggggtccgttgatggcgtatgatgtctgggaagagttcgaagatctaccctgtggaatggagcgattgacgaacatcaagtggattgacaccgtcaaggccatctatcgcatcaaggaagggcccaaaccggaaccaccacgcgggaagcgactcgccaagactgagaagaagcgagcgagaaaggcagcggcgaagtcagccaaaaacgctaagaagagagccaagaagcgcagccagggataggcatgcatccaaccgagaatacatgtggccttgagctccctttcattgctttctggttcgtcatcttcgcttcaaacgacgttgggcttcgaattccgcgatcaagtctggcacttgcttcatgttttcaaccggctcccaagtaggcttctcttcgcccacccactccacaaggaattgcgtccgtcgtttgtggcgacgtttccctaggagtcgacgcacaaattgactgacagtgccatccgcaaggatgacgtcgtgcggccgtgacaaacgactcggttcattgtagggcttcagcgagccagtgttgaagactggatgtagcttgttaccagcctggatgttgagctcgtaggcatggttgtggatcttccgcacaatcgtgtaaggtccaatccacttcggtccaaacttggtcgaattcggcaagccagagtgctttgggttgaggttttgcgtgctcaagtacacgcggtcgccaacgtcaaagacttcttcttcacggttgcggtcgtagacatcacgcattcgctcctgcgcctgggtcaatgcttcgcgacaactcagcaagatggcggcttggcgctcatggaactccgctcctcgtcgactcttgggaatgctctccaacttctcggtagcaagctgaagaggattcagcgggatgaatcccagatcggcctcgaatggcgctcgcttcgtgctggacttgaccgttgagttgacggcaaactcagcattcgctagatgacgatcccaatcatcctgaagtggaccaacgaagcaacgaagatactcctccagcgttcgattcattcgttccgtttgcccgtcgccttgagctcggtgagccatggtcatgccgctcggcttcgtcccgattgacttgaagacgtgttgccagaaggcggacacgaacttcctgtcgcggtcggtgacaatgttcgtcggcataccatggagcttccaaatgttgtcgatgaagagtcgagccacgccttccgccgtcaccttcttcgtagttggcaccaaatggcaacgtttcgtcaaccgatcgacgacaacccagatggagtcgacgtctcgcttcgttcgcgggagatccgtgatgaagtccatggagatcgacctccaccgttcatctgggatgcttaatggctcaagccaaccaggaggcttcgttaaccgaggcttgtttcttcgacagggctcgcagtctacgataaacttctagatggacttcagcatcttcgacaagtaccagcggttcgctagtgtcaagtatgttcgctcagcaccaggatggccgccgtagttggtgtcatgacactcgctgatgattgtctgccgcaactttacatcgttgggcacgacaacgcgcggagcgtcatctgcgggtgtttgataccagagcagtccattcgcttcagtgtagcatcggtaagtcttctgctggttgcgttcacgcttcggtttcgagcaggagttgcgccgcttgatcgctgtgaaaatggcctggacctcgcggtctttctcatacgacttcttgatgcttgatatcaagtcggagtcggcagttacttcgctgatcgccagactgaaggatgtatcgtcgaagcttgtcacactcaagtcgtggaagaacttcgtctccggttccaggtctggtcttcggctcaaagcgtctgcaataccgttcttcactccagggggacacgagaacgtcggttgatactccgcaaggatatcataccagcgtgctagtcggcggttggccatcttctgtgtgaacaggccttcgagactcttgtggtcggtctccacaattggcggcttgtccaagcagtagatccgaaacgcggccagtgcatgaacgatggctaacaactcctgttgttgcgttgggtagttgagctccgcagacttcatcttccgactggtgtacgcaatgggacgctcgacaccatcgacgacttgaaacagcactccacctacggcgaacttgctcgcgtccgtccgcagatgcattggctggctgaagtccgggagatgcagcactggtgggttgcacaccctccgcttcaactccttaaatttcctcagctgcacgtcgctgaagtgaattttcgcgttgcgcttggccttcttcttcagtagggcgaacatggttgccgtgagcgaagcgtattacgggcgaaagcgttgcacgtagccagtcagacccaagaagctgtgaagatcctcttgggtccgcggcacgggccagtctttgatggtctgcaccttgtcggggtccatccgaactccgttacgtcccacgaaatcaccaaggcatggaatctcgtcggcgcagaagacacacttggacagtttgacgtacagcttgttgtcgcgcgcaagatatccaacgtctcgcgcagcgcctccaaatggtcttcgatcttcggcggcttggtgaagatgtagatgtcatcgtagaacgacttcgtgttcttcaagtctcggaacagcttcgaagtcaaccggtgcattgttgctggcgcgttgcagactcccatcggaagtacaagatactcccacagtccgtttggcgcctagaaagctgtgaacttgatgtcttcctcccgcatacgcacttggtaatacgcggacatccgatccatagtggagaaccagtacgctccagacatggcgtccaagatgtcttccttcctcgtcatcgggatgctctggcgcacagtgtttgaattgagataccggtagtcgtgaacgattctccagccgactggtttccggacacagaatatcggcgctgcgtgaggactgatgcttggtcggatgggcttcttcctcaccatgtcttcgacccaacgcacgatctcacgctgctgctcaggagactgtcgccactgttgtcggtatatcgccagatttggatccttcacatcgatccgatgctcaatgtcccgcttctctggtaaaccttcgggtagctcaggacggaacacgttgtccttgtactccgttaggaggtcgaaggctggattttcacggaaactgtcccagtccgtttccagatagcgctgtgctttcgcactaccaacattgtcgggctggtctcgccgttgcagtgagcgtgcaacttgcttgatcgtctcgttcgagagcaccaacataaagtcgggctcctcggccgacttggtcttgattctcaggaacttccgcagtttcttgcgggtgatgtacttggtctgcacaccactctcgtcaacaacacccatcgtgaacatcttctccacgacggtgtctttacccctggtcctgcttctttcgtcggcttctcgtgcggtactctcgcgctctgacgtcgcaacgtcgtcttctccagctgaacactcgccagcttgcgggtcatctcctcgtcgtctgctggcaacggtcggggtctccttcagcactgcgtcgcgaacagcttcgcacgtggacttcacacccgtttccagctcggcgcctcgacaggaatcgggtcatttcgccgaaaggcctttcgcctcgacagatctccgaagcccggaggcaatcaccggtccgccttcctcgatcggtccacaggtgtcacctgtccgctcccagcgcagagtcttctctctcgttccttcgatacgtcgacctctccaatcaatttggggctgcttgtcctcgaagaagggtatcccgaggatgcagtcgaattcgtcgggtatcgcgtagacgacggcgacacactggtacgcctcgtccagacccgacacgtggatcttcaaaggcagaacttccagctccgtctccccgattaggttgtctccaagcttcacgcgaatgctcttgtcgctgaacttcgtcgttcgaagctggtgctccctgacccaacgctttgacacgtagatcgtggtggctccacagtccagcaacacgctgcgtgtagttagacacttgtcactcacgctgatctcaccagttactgagaacagcggacgtgacttgtagaccagaggattttcacaggctgatattctcaatcttaagtgttctggttacgatctcagccacgacaggaccctccttcactgccgtggttgcccgtttccctgtttctcctgctctttcttccagagaaagcagttggtcttgatgtgaccaggcttcttgcagtggaagtaggtacgaccctcggcgcgtttgggctcagctctcggcttgaagcggcttttcccgcggaacggcttccccttgaagggtttaccttgggcgtgaggttgatcagccgacgagaacttcttgtcgcacttgggttgacggtcgcgagcttcttcgacgaagtgagtcacctcgtacttgacagccaagtccatagcgtcgctcagggtctgggggttctcgagcttgacgtagctgcgcgtgcgaggcttgagaccgttcgcgtagcacagcacttggtcgagtacgctcatgccctccactctgaagatgagagctgagtactcaccgttctacgtctcaatgtctgctgcctgcttgagtcgctgaagcttctcgcgcaggacagcctggtagttcgatgcatcgaagtgttggagcacatgctcacggaaaaccccccacgtgtgctcctcgcttcgagtcgtcgacgaccagtgcaggaaccagccggatgcaggcttctccatcgccgaccccgcgattcctggtagtcgggtgcttgcgtcttcgatcgggatgttgttgattcgacaggcgttctcgatctggaacagccattcgcggacatcctcccctcgcttgccggtgaacttcggcaggttgctcggcactcgcgtgcggtccgccatcgcttggttcagccgatcgatctcggcgcgtagttgggcgatggtggacatgggctcctcgttgtcaggttgctgggaccaacaagtgctaccagtatttcaaaacgaagaggaagccaggcttggggggatggcgggtctaaaccaaaagtgaccgcccccgcagttcgagtggatggaagctcctttctagaagcttccacaaccaccctacatctgctctatcctattatgtccttaacaatgcgaatgatacctacggtactgttacctctctaatctgatacagtccgtattgaagtgcagccatttcataacgtcaagatgtccgttggtggcggcaccgtccataccatgaaatatccgactatcgggggagtggttagagcaaccataagtatggttgcttttagccattctgagacatgtatggttgcttttagggatttcaaaaatttcaagcgtaatttaaatgtctaaattaccattaagcccttaggttcgcaaatcacgctaaagtgcgcgaagacgaagacattgttctggatgaggaggatgaggaagacaacggcaacgaagaggcggagaattgctaccaagaggaggaagacgaagaagaggtcgatgatgccgaggagagcgatagcgatagcgatggagaggagggtgacgacgatgaacaggaggcagacgacgacggagaatccagcacagaagacgaagcagaagcgggtaagactcgtttggattattgttgatacttattgagttgaactgataatgtattgtgtatttttttagtttgtttacaacgcaggacacgcaaacagagccccgagccgagaaagaaagccacagcacgcatgaaaacaccaggtattctcgttaaagttgctttaagcaaaaaggttgcgctatcattaatattgacattcactttggaatcgatagataccgctctggccaaatgcaagctttctgctggggatgaagcccaatctttcgcgaaaaagcgtaaggcggagctgcagcttcacgagtctgtcgacgctgattcggtcccacgtttatccaagcggaacaagcagtacataccgcggaagcgatcaagcaagcaccttgacgagttgcgggagatcaacgaggagcgcgaagaaattatcaaccccgttccgccctttaccccagcgattatcaagagttggagcaagttcaacgcacacttgaaaatatacaagcagaagcaccacctcaagtttcgagtacgaagctcggagacacgaaatcagtacaacaggtatgtgtgacctctgtttgatgagacatttaagttattatcgaaaccccctttcatatgcagcaatcatcgggaccaaatcccttcacgttttaattggagtcacaaggtcctccgctgtacacacggtgtttcgcaagcgtcgcgctccaagggacatcgcaatagaaaaggcaactattgcgggtgtcctgcacgcatgacaccaaccgttcagcggacggaaaatggcaaatttcgaattgtcataagaaacgaggtatctgccttttcgtgtatttgtttgctttgttagtatttctcacatgtcgctgttgataatcagaactttacccacacgcacccgaccacccgaacgcaagcatcgttgtacctgacaacaaagacacttccgttggacgagcaagatctcgaagatgttaagactttaacggatgctagtgtttcttccaagcacatcacgaacttcctgaatgagagaatcggtgcgtagttttatatatgatatgctgaagtgatacttacgttactgttcgcgctttgtgcgtttgctaggctgcaaaataacacctcaacagacccgtagtctgatccgcagtattatggggcacgacgcagcggaggcccgtttgaaagacatgctgcaagctatccgccagttagacggtagtgacgtccttgttattcaagaccaaatggacgtgacatgcggtatcgtgatgcaaacaaatgtgcagaagttgatgttcgagcgctggggcgacacgcttacgatggatttcactcacggcacgaacaatttgggctatcacttgggtgcgtatgagttgttcggtatagcaactttatctttgttacggcaaccttgcgtagttatagcaaccacaccaatgatatagcaaccttattaacaaagtgattttctactgttgtgtgttagatatttcagggaggctggtcgtcacaaccgctactggtagagggttcccagttgtacacttcatatgcctcaaccaatgagctccgatgatgacaacaatcctggagtatttccaagaaaagaacccaagttggcggatgatatcctccatcgtgatcgacaaagatttcgttgagtggagggtgctgaaaacactatttcctgctgcgaaagttttactttgtcaattccatgcaatttcgtactggaagaaggtgatgcagcgggccccatagaagctgaaggtgtctgaacgcgacgagttactcaacctgatgataaaaacgatgtacaggtacgcaacaggttctatttatgattcctgtggtaacgctaactttggaaaacaaaccatatgcagctccacagagacaggttacgattctagttacggtgcattgaagcaatactgcgaagacaacaagaaacaagctttattctcgtactttgaaaagaactgggattcgtgtcgagacatgtgggcgaactttgctcgcagcaattttttcacggctgggaatactacaacgaaccggatcgagtcaaactggaatcaagtgaaaatactgttggggcacaagacacgaattgacaagactattgcgggcttggtgcagcatcaaatcatgataactcagcagatcgggttcgtcatcgcgcagcaccattcgacttcgcccgttcctaaaaccataccgatgtttctccggacggtagcaactcgactgtaccctgacatcttcgagaaagtgagaaaagagtgggaacgatttgtgaacttcatggcagatgcgacttgtgagcgtacagcgtcgactccttcacaatggaaaatttattgcgggaatcaaacctttcgctgtcacgatgtggagtggacgtgtacttgtctattttatagcagccaccatttaccatgtcgtcatcttacgcacatagcacgcgaggggcatggcttcaaactgcttccagctatggcaattcatgatcggtggagtacgtaccagaccttggaagtgaaaaacgaattgacggctgcagcggaaatgttacagccaattgtgcagatgtccaagttaaggttgttgaaagtaaagttgccgaacgacactggggctgaaccagaacaaccactttatgctgcggggggtaacgttccgccaaccaaagctaggaagcaagttgcgtacgtacggctacggcgaggtgaacgggcaacccaggttgtattgtcttcagctgaaaaatacgcatacgcaaaagcgatgctggaaccgctattggaacacctgtcagatttgtctagtgcagacttctaccaagagctaagtgcctggaaggaaacgatcgacatagggctcaaccgtgtcaaccctgccccccaaccgagttctacagaatctgctgaagatagcaagcaagaagaagatgtatctgaccctgtctcagactccattctggaccccgtggaggcaatggggactatgacgctcatggacgcatcggaaagcagccccatgaccatgaattatggcgattacgagtccgacgaaagtatgttaccgatacaacgcactcacctttcgcagtcatctccaattcgaccccccatcgatgagaaatctcatgacagctgcggaatgagtagctgtgacaaggtctcaagctctacgaagcctgacacagagtcgcgcgtgcgccaggtcgatgtcgttagagttcctaagccaccaagccaaggaaagtcaaggtcaactccgaaacagctgaggcaaactacgatcagtctcaatgccgaccgtcttgctgttcacaaagcccccccccccccctgaacttgccgtgactttggatcagttcctgatttgggccagaaacacctcaaatctgaagcgcgtgatggagatgctgtcgaagtatcgtgttcagctggaggatgcctatctaagagctcggaagattgattgtcattgggaaattgtacgacctgcggactacatgcacacatttgtaattccacaagacctcgccctatcaatgcaggcagcaacggctactacctggaaggagaagcagccaattgtactggatgaaaaggccaagaagcaaggacttgttctcgacgtcgtcttggcgattgatccaaaactgtgtaaatttagcgggtatggttgctttagcgatatggttgctttaatagggctgctttaacatgcttatatttctagacaatatgtaggtgctctaaccagattctacgcgatcaaggcgaagtgtacctcatggttgaaggaccgaaagtggctggagcaagattggcgtaaagttgactccatcgtggatcttttcgctgcggaggcagcaactgcaggactaccgcgtgatgctgttcccgagcggcaccaaggtctagcgaacgaaattatctcaaagtttacttcaagtcggctacgcactgaatttgtgacactctccaacaaagtcctgatcagctttgacaacatcgtgggagggatatgtcgtggatggttaaatgatagccctgtggacttttgcttggagacccttgcgagatcggtgaggaagtgccatgtgctgtcatcactgacatgggctatcggatggccaagtctccctaagacagcacttgcagcaacgaattttattatccaccccgttaatctgcacgcagaccactggggggtaattatacttcgcatacgctacacggcaaaaacaagcaagcttcgggtgaatgtttacatgtacgagccgctcattgatgatgactatcaccatgaaatggaaatcgtgtggactggaattccgaaagacaaagaaaatgaaggagaggaggggcttcgtggttatgtggagcggcggcacaaggcttctgacccccgtggccatcttttcatcgatccgattgagtggatctgtgcccctcaacaacctgattttgctagctgtggtgtaatggtagtagcccaagccaacagcaatcttacggggaacttgcagatgcaactttctagaatttccaagaacgacgtcaaggtgatgcgattgaaaatgctgtgggtcatcatgtgttactcccaagaacgtcatctctctgaacgcgacgtcgctaaagctagccagattcatcagcagctacagaaccagctctgagaaacaccacagtctgtatttacctttaaatacagagtctatgctgcattagtctttcatttttcgcaccgccagctccagtagaacatcgagggaaacagcgtcgtcctctgcggtgagaccaccttggtcggccccttcatcgcccaagacggctgctaacgcatagctgttctcttcgcgatcttcgacgagggcttggatttttagctgcgctgccagaagcttttccggatgctcggtaagctcatccagcttcttcttgaggagtgcaatctcggcgattctcgcgcgcaccagctcatgtgccagcgatttcttctccatttttgctgtcgctcaaaatctgctaagtgttgaaaatgtgggacacatattgtcatgtgtttcacgtattgctgtgtagagaacatcagttagacgccaccacgacgtgtctaaatttagatatatatgtagcaagacaatgacgagggcgacgtgtccctgtcatttacgcgtcatttaaaataaattaccgggtgccagctggttttagggttgctttaggccttgtggttgctttaatttctgtcgtgttgtcgtcatatggttgccattcgacgatcggacctatcgtacctgtaccaaaaacatggtaccctacaaggatggactctaaaaacaaatatataagtttgtgtattatgttgtgggccacacaccgattacacttttgctcatttttattctagcgttggagggcagagtgccggaggccgcggcggtggcgccgagggactccggccgcaggaaggcagcggcaggtagcaggctccaggacgaaggtgaagccgcaggacgacggcggcaggtcggcggagcggaggcaggtcggtggctggctggacggcgaggcggcggcggcagggaggcagcagtcggacggcgacaggttggtggggcggtggcggggcggacggctgcccggagaaccttgatgacttgcccggcagggcggccggcaggctgcccgttgggtgagcgcctgcaagctgcggcgcgccctcccggcagccccgcggcccgcagaagcagctgccaccaccgccgccgccgtgaagaccccgcgagtgctagtgccttacctggaagggctggcggcatgctgctcggcccaagagctgcgtgctgcccgctgcatgagcacgcagcacgtgcgggctgcacgatgccaaccacgctgcattgttatgagattattcgttatataataaacgtatatttaataaaactcctccactgttaatgtacgtgcctagcggcttcccttacgcgctcattatactcaccatgcacgctcctacattgctacatcacaacgtcgagatggccattttcagtttcaaatcctgcatatgtacctcaattatggtacaggtccgataaggtcggataaatgggaaatatgcgtgtgatacgagtttatctaagaatttgtatagacatacacatattttgcaagtcggatatcggacttccctaaccctatcgtaatatattggccgaaactctgccatgacctccctatgattggcgcaaataaatacaaatgctgtaattggctgttaataggcatacaataaataagtaaggtcggataactcgtcatattcaaccatagcagagctggtacatgctatctccggatagttatcgtttagccattgtcccacatggagatgacctcctgtagctgctccatcgatggcgtggctgctgttatacgccacatcagtcccaccaaaccacttgacgacatccaaatggccgtttgatgcagcaccgtcgatggccttgttcgtgcatttgtagcgacccttattcgattcatccttgttgcgctttcgactgtcagcacagaaaaaatatccatcacctccatcgcccgcagcaccttacagtacctgctgggggacagaatagctgccttacttgatcggagtgcggcattactagcacagccgtgcatcaaaacacctgccagcattgttgctcttaatcaaaactgcatgcacaggtagcaagggagccagcctgaccgaggttgcgctttgttgcaagtttttgcgaacctagctcgagtcagcaacgaatgctgctcattcgtgagcaaataaggttcgacgcagcgttgtgctttcggatggttgccccagcgtaaagcctaagcatacaacgatgacaagtagcgctgataagctcaggctgattctttggggacgtcgtcaaatgtacagtttactgtacgtaagagctgctcagctattgattattgtacatcaattttgtgatgacaggttttgatttctagcgataaaaactatactcatctctctcattgcagtatttgcagtggaggagttgcatcatggcagaataaattacctggtttctggtggtgaacagacaaggacgggcactcgctggagtcaggaccgcagttgtatcggactgtgtgtccgtcgaagcgtttctcaaagctgcctaccgtgtatgctcttcctggctgccctcgagtctcatcccttggacctaacagtatccccgaacaaagcggcccatcaaagggagacctcgatgaaactagctgacaagctcggtgacttgggaaagaacgccgatgacccacttattgtgagggtacccgaagtatggttccagttggtggatgcttctactcgggatgtgcttacaggaagcagcgaacacccagcatatatcagagaggagagcatcgttgctgagctgcgaagaatagtacgaaagatgttaccttacacgcttccacagtcggcggttatcaagatttacaagaaccgacagcatacgtcacgaaggaagaggagatgcatggagatgaaaatattggctcgttcggtaaaaccaggtcgaccgtactcgttgttgaagtgccaagcttcacctcaaacaattcagcaccaaagcacagcgtactcggcacccgtgaattcgacaagatgggaggcaaccttcacaacgagcctcctcctaagaggtctagactgcgacagtcgcgacttacgactgcgggtccagtgatcgagggttttttctgttccgatggaaagtatcgccgcttttcaaacgatcaaggatagattttcagacactttatcgctcgatcgtcccctgtttgtgctgcatggaccacgacacttcggcaaatcaacgataacctacgcaattgagatgtggctgactgcagatgtccctgatgtggtgcgcgcatctattcaactgatgcttcctcacacggatagcgacaatgtgttttggaatgtcatggggaagaccgtcgacaggcaaagctcgcgtgccaactcgacatcattcatgaatatggtgaaaattcgcaccggtgtcacgaagaaaagggtctgttttatcctggatgaaatggatgctcttctcgcgaagcccgcgttgatggttgcgttcattgctgtgcttcggcagctagaagcgtcgtcctacttgtgtggatttcttggggttagcagacatgatttggggcgccactgtgattttggtcctggaaacctgtacaaggaggtcaacttgctgaaggccgagccattttcaacgggtcagatggctacgtttttcgagctgattgagccacgttccaacttcaccaagtcacttcggcgtgcgatcatgcagtcttctagtggtgcgcattgtgtgtttggatccatggttcgcttgacagtcgatcatgtgaagtggacgaatgagggctgcgaatgggagctgtggttcaagcaactgcggatctcactattattgacaaacgatattagcaacttttagacatctatcttgacggcaatacacgcgcgcacttgggggccgtggcgtttaccctttatacacctggttggctgtctgtcaccttctcattgccgccaactcgtcttctctacggcactcgttaaaaatcaaacttctcagtaggaggagctccagtggattgtccactagagcatcgactgcgcagaggggccttcgctagcccctccatcagctcacgcagctcgccgctctcatcgcgtgctcttgcttgtcgactggtgggagccccagctgccgccggtggtagcggcgctgcagttgtagtttgccgcggttgtccttgctcttcatccgaggaggacatgtagccaccgttgcctgggtttgcctcttcaccgtcttcactcccgcttggtacttcatccggacctgcctgcgcagcagcgatagcctcagcaggacgacgatcaagacttcgccgttgaactttctggaatcgatcctcgggatcgaacacgtaaatcgttgtaccttgcacgggtgtcggtgctgatgctgccgctccggttggccgggctgagctgaatggtgggagagcgggaggtgccgctggaggaggaggcgggggcggccttcttgatgctcttgatgtagcgttatgtggcgggaatgacgtcgaaggatcggtgttagacggtgtttctggcggtgacggagatggcgcgttgatgttggcaccggatcgtcggcgtggcggcgcgtgcgtgagctcacttgagttcatgacgccgcggagactagcgacgaggtcgggcggagcacgagatggttcggagagccgcgggccttgtcctcttgatgcagtcgaagtaggagacgagggcgcggcgtctactgctattatggccacatgcttctcctttggaggctgtggggcaggtccacgcgcctgcttcagtgctggtagcggtgcagaagactgtcggtggtgctgcgttgaacgctgttctggctccggctcgtcctctgcgttttcgtcaacaaccggtggcacacccacgggagctgctacagtggcagctggatcactgctagtgttctcggactcgcgctgtgatgcctcaagacgctggtggagacgcccgatcttctgcgcaaggcgttcaataccgcggttcttactcacggtcacgactgatgtcggtgttgtacctggtgctggttctggttcagattgtcgctctggctcgacggtcattgcagacactggcaggctcaagtgtgcgattggctcggattgccgaacccactgcatggcttcctccagtgcacgggcttcttcgacagcgctctcatcttctggtctcggggacggaagcggctcgccggcgtcttgatggtccagcgactgcaccgatgctgacagtaacgacgatcgtgacgacataaattctacactctcgctctcgtacgcgctgcctgtgccttcgctgaggctgaaggccaactcactatccagtcggtcggagttggtgtctgacgggcccattggatcgttatgtccgatggattcgagcaccatatcgaagtcagagctggatacgtccagcgtctcacggatcttcatgatgcggtcgtagatctcgtcgtagcgctctgcacctgcgtctgggtctccgtgcccgctctcgagcagcatgctatggcgttcctcctcttcctcggcctccgagatagccacattgatcgtgtcacggatctgtcgaacgtgctcaatgagctttcccagcgcctccttcttggcttgagctgacatcgacgtcgaggatgacagcgtcgagtgacgcaacacgcttgacctccgttttcggtgtgctgactcggatactgcccttgggaagtggtcgctgccttcatgatcatcataatgaccatacccatgtccttgggcgctgttgtgactcgagagggggcgatgccgctgtcggaacgacgggatcggcgagcgcacaggtgtcgcctgcgacgacgagccacgcagagagtcttcaataccccctctcctcagtcctcgatgcttcggatacctcagtccacccacgtacgtctccgtgcccacattcgtcgtcgacgtcgtggtctccagcccgtcgtcactgtccgtaaccccagagatcatgctgctctcctggtggcttcccgcttgtgccatacacaccgaacacactcgcatagtaagcgtgtgttcgtccagaggctcgtcaagctcacgcaacggggcgcagttggagcacacaacttcaccacacgtagcgcaatggtgcttccgatggaagtagaagccgcgcagacacacggcgcaggccttgcgttccttggtagaaacccactcccactcgtcgagatactgcagtctccccatcctctgcctctccagcagtcccttcactcggtgcaccgcagcgacgtagtccaccatgatctcctccatcgtcatcctcacggctgcaggcaccatacccccatcaatctgcgcaatggccgtgaccttcaagatgttcgactggtgggtcttggtgatcaacacccccgtgcgcaccaattgtccgcgtagaatatcatacctctcgagcgtcggcacctctctatctctcgcaatactctcctgcacacaaaagcccacgacactactagagcccgcgtgggccttccttttgcccgcgtactccaagtagcaaaagtcgagcgacttctgtccctctcgccgctgggccttaagtaacatccacttgataacccggtacgagtaactgggcgtcttgtgctccgagggcgtaggaaatgtcaataaagtctgcgtgtccacgaactcgtctccatgcagatagctcatggcgcgccgtgcgtcgcgcgtcttgaccttggccagcgcagtgaggatctcctccggctgcacgtccacgatgtgcacgctgcacttgagcaaagtggacggcgtctgcgccgccggctgcttggaggacggccgaatgtccaggaactgcgcgcgcgcgaccgcgcggccgccgcgcgccttggcgtccgtccagcggtacacgcagtcggcgtcgtcgatgatgcgcacgagctgcgccacgcgctccttgccgaagcgccggtagtgcatgagctcctccacggtcagcaccatctgcgggaagaagcccgagtacagcgggaagggcagctccgtcgccatggtggggatggctggcccgaggctcactttaaaggcgcctccttgtgtggtacagcgagaattccagactgaaggtgtgctttgtgctttgtatcgtttgctcgaggtgaccggtctctgggcgacgtgtgtgtgcgttacaccaaaagtgcaggttgtacgggccactgactcttcaatcccagctggtaaacttcaacgcggaagttgagcgaagcgaggccagtcatcgccgacttattggcggtagatacactttttggatactgtggggcgtgtacgggtactgttgggctggttgtggcgtattttggcagagaggttggactttggagttctggtggagagagccacactggaacgagaaccttcgagcagcgttcggaaacgtgatgagctctcgggtgcagtcaattgtgtccttggcccacgcgcgagctgtatgaatcgttgtgtattttgtaggaatacgtgatggcaatggttagtgttagccccgcttcagggttgctctctcgtggatgcctaagaagacagcgtcctccttctgcaggcagctgacgatcggcgctgggttttatgagcggccatctcaggaatccattgtcgagcttgaggaggattctctccagagcgatgggtttatccgatcttactgttgctggcgccgacctccacggctcaagctggctgtacgtatccaagggcgcaatgctattttcacaacatccgtggcaactgttcccccattcgtaaacacacacagctgtaaactgtagcactacggaagagctcacttagaaccgagtgcgcgatatggtccagtttttgacaattttcacgaagcggatgaaaattgtacactttcgcaactacataacctaacaagtcaatactggacgaacatgactaggctcttgcttgtttgttggcaaaaccaagatctgtacttagtaaggtatgaatgtactctagaccaccacctttcgctatattggtaggcgtggttggaccgtagacttcgtatagccgtcaacagtcctcaacatgtcgacatgtcaatccacgcacgatcgcaacattgtgcgattggttggctctcaatttcttcccgggaattccggaggacggattaagctgaatgtacgatctgtgggtcaaggcacccgaaaaaataatactcataaaaatacattcgaatactttaattcaatgattaattttagaccctcaatttatttttgaattgcacacaattcgtatttgaattgctcagatggagttcgttgcagccaccagtgtccgccgaagagtccaccaccaaccactcgccgatctggcaccacttcaccgcaccactcgcagcggaggctccttcagaatcaaatttgctttcttcacccctcaccgcccaagcccctcgccccacgtgtccaccatggtcctcacgagcagccaaatctgctccatgcttttcactgatgtcggcaacgccttctacaagtgtacatcctgcgacaagcagtacaagaagggcaacggctacacgaacctgctgaaccacctgcggcgcaaacacaacaactacgagcaagaggctcaggaggcatcacgccgccagaacctgatgcgcctacacctcgtcagcacacggaccagggacctataccgctggctcgagtgggtcgtctgcaatcgcctcccgtttgcgttcgtagagcggcggctcacgcgcttcaacgcctccctctctctcgtgtcggaggacaccctctccaagtacatcgtgctgattttcgagctgctagagctgcgcgtcgttcgcgagctccctgcatcgttcggtctcgttctagatgggtggaccagtggtggtcgtcactacatcgcgatattcgcggtattcagcagcgacagtaccggtattaccggtggcggcgctgacaacgagtactatgacgatctggagtgctcatcgcgccgcttcctgctgttaacattcgctccagtagaggtcgaggaagacatggatgcgcagagtcagtacgacctgatcgccgacacgctgtctcgctataacaagccctggagcgcggtgaagttcatggtgggagacaactgctctgtgaaccaatgcatcggccggaaggaaggggttatccccttcattggatgtgctagtcacagattcaatttggcggtgaaggacttcctcaagaccgaggacgagcttattgcgaaggtgcacgcgctgatgaccaagctccggacgatcaagggccgcgctctgcttatccgcgtctcccatctgtcgcctctgttgaggaacgacaccaggtggtcgagcacgtacgagatggtggcgcgctatgtgaagcttcagcccgccataatcaagctgtgccatgaccttctggtcaagtacgaagtacagccgcttttgctgcggcgcgccgagcacgagcgagtcaaggcgttggagaaggacctggagaagttcgagggagtcactaaagagctacagaggtctacgctaactttgtctgctgtgcgccgtctttttgaccaggtcgtgaaggagtaccctgcactcaagtcacgactggccgcaacggctccgattgtcaacaaccagcatttagaactgggcctcgtcaagcttcagcgcgaagaggtgttgacggccgcggaacggtcggcgtgtgccgagtttagatcgacggcccttgaaagggcaccagcgcgggaggacggcaacagctctatcgttaaggcggcgttcaagaagaggaaggcaccgaggcgctcgcaatacgtggacgtcacatacgtgccgccgacgtctaacgaatgcgagcgcttttttttcggcggcgaagctggtgctcacagacgtgcggaagagtctctcccccatcatgctcgagatgctgatgtgtctgcagttcaaccgcgacttgtgggacgtcaacacggtggagcaggttcgtgcacgaattggcagcaattaatggcaataatgcaatgattaatttttgcccgcagtttagaagtattaatctgagtgttgcattctcgggtgccctgctgtgggttgttttcgtggtgatggcagaaatagctacgaagctgaatagcagcccaggaagaggggcgttgcagcgagcggacaagaacgacggtcttgcccgctattctcaagtgcgattgggtgaagttcgttgcttctttatcatgaaactgctgcctaaattcggccatcggactacaacttgcactccatgtagccatgtatagcagatacctattcccaacccagtagtggcgaactgatctatccgttgtgagtgaaagcgttaagacatgcacttatctttcttgactccgtgaccccaatgcgtcagtaggagacaccgagctacaacctcttgtgagcactcttggagttctcacttctgcattcccttcacccacgccacccgctcttcccctctcaagtacgccaccaaccatggccgacgtccctgcaatgcccaaggtggacatccccgttgcgatcccagtcgacctcgaggccggtgcggttcctccccagccaacgtctccccagaacaacttcaacggcggtcagcaaggcaatgtgggccggcagcgagcaagcggtgcagacccagcaagtcaacgtgaccatagcgtctcctattcagcaggcgccttcagtctacgagccgccgatgcccggtagctgggtcgtcggactctgcggctactgccaggacatgatacccaactgctgcatggcgtggttctgcccgtgcatctcgacggcgcagatcgtcaagcgtctgggcgtgagctcctactgctgcggcctctgcttgagcatcctgttcctgtggatagggctgttcccgtgctgggtctgccacctacgcggcgccacacgagagcgcttccgcaaccgggcaactgctgcggcgactgctgcgaggcgtgctggtgcaccagctgcgctatcgctcagatggccacgcgcgcgggcagctacaagcccggaagctgcagctttggctcgctcgactccctgcacccctacaagcccatgtagagcagtatgataccgccgacaaccaaccaatatcaagatagaacctactataagcatcgaacctaatatcatcgcatgatgaaatggtgaaatggtgccccgtcagaagaacagaggaggagaagcgatactggcgaaaggctcatcggcagagagtttgtggtgactagctcctgtatagagctatcgggccggacgagaaccttcgagcagcgttctgaagcggagtttcaccagtgtgcactacctggttgacgttgaagtactaggtaatgtggcgcgcatttggtattatctggtgttttgtattttatccttcacttgcgtatctctatgacaatgaatcgatctctactagcgtgacagctctcatgaacctactggccggtgccgactggtgcgcggcattccggacagctcgggttgtgccgcagccacgacatgatgcagttctcgtggtacacgtgggcgcagggcagtctcaccgagaagttgccagagctggcatcgggcgcttcagcctcctcaccgtcgctgctattgccactctcgttactgccgctgctggatgtgctttcaggtatctcaagccccttcatctcacccgagaccagcggctcgaggcaaatgctgcacgagtgctcggagtgcgtgggcagcaaatcttcgacgtcttcgaggctcaggatggcgttcgcgtacgtgcaattcgcgtccagcacgctctcagggagtgacaagaagtcccgcatcagtaagtagatgtacaacacttcacgccccaatggagcgggtaggtacggctccactaccagcgccggaacaatcacctccaatgccctccaacattcagagaggaacccctcgagttccaccttcccaatgttcatggtggcagcgtctgcgtggatggagaacgccgcgtactgcaggtgttcgtatcggtggaagacctcggccaggatccgtaggaacacctcaaagggtttccattccacgacgatttcttggccctcgtcgtgttgctgctgctggatattcgtcggcgcgaggtgttgtgctaccgttggatggtgcaggatggcagcgacttgggcgtagaagccacgaaacttggtctggctcatggcaatgacccacgcggattgtgtcgtgtggccgccgttcgaggaggacgaagacgtcgtcgtcgcgccggtcgccgccatgcatgtgctggtgatagtcagcgagagcgacacccggtagaccacggccagccccacgcagagcagccgcgcctgcacgaggaagctgaagctggacggctggaactcctcgctcatcttgcgcagtcgccgctgcatgggcgcgttgatggcgttgatggcggcggtgtgcacgagtttcacgcgtttggtctcgcgttccccttccatcctctgctttggcattattggactgacgcccgagcgcgcggaatgcaaaatgacgacgaaaagcgggcgacttgagcttagcgcggcgtcgagcagcaaactgaaccgaacgccggacttacgccacccccctcacggcgacttgtgccgtccatggaagagtgcttactacaacgatacgggctctgcgagcccacgctgtagacgatggagtaggatagtcgactcttctgtctccgactacaacaagatacgcactgggtgcggggcacaagttgatcagctccgggctcgaaacgctgagaatgtttggaggtacgtcgcatcatttgagttgagggtggcgctgggtagtggaagacgcaagcgcgacagccctcgctactgggtggtgcagacttataggcctgtgcgctctataaggcaaatttatcgtgcttgccaacgacaggcaagtagaacggggaccaccaacacgctcgacgttgctccatgcggcaatgctcaatagttctacagcaatggatgtcgcaacgcgtccgaccccacgccgaactactagaacggctccttcgccctaccatgaagctttactatttttgcgttcacacccaagcaccaacgcgtaaacaatcgctgttgtccgttgtcgcttgtggcgtggcgagtccgtctgataactcgataggcacgcggcgtgcgtaatgggccacgtagcgttcagcccggattgtttctcgaactttgtttcggtaggccttcttcctctcgatgctgacagcccacgtgctcgtggagtggccccgcgaccaccaaacgggtatggctcaggtgcagaggtcgccgtttcaacatgctgagggtttgtgcgacgcgcgcaataatacgcgtctgcgttgcgaatggatcggggctcaagtgaccgacaagttcggagactactctccgcccagagtgcatttggctcaagatgctgcgcgtgcagagagatacggcgatgacttggctccatacggccgtgtcacgcgctaatggtagtaatggctgtaggcaaggccgatttcagatatgttttctggacttgtgagctttgacaaaaaattactagggtgactgagctcaattattgtattccgtccacaactagcaaattttacctgtccagcgtactactcgctgcgcataacgtcggcttggatatattgcatggatgcggatatatttcggttggatacttaagcgttgccttccactgaaagtctcttgtacggattatcgtgaacgccacagtaaattatgctacacacgagaggtaaacaatgcatgtaaggaaaacaagctgaattgacgtcgatacactattgcggaggtactagaagtattaaagccttggatacagcctctttaggttctgaagttctggatccctgcacggctttactaacatcatggcctttattcttgacggagcagaaggtgggacgcatcgcaaaacttgtccaggcggcgacccaaagcgtagcaacgcatggttatctcagctaacgagatcaaattatctttcgccccctggagcattgacgtagctgcagttgcttcagcaaccagcaacgagaacgcatcgtgacactcaaccccaggtttatcgttgatttcctcacttaattcctcgagacgatcccacaatgcatatttccagaggtaaattgcgaaataaatcagcttgttggaacttgcccgaccggagtctggtagccaggtgtgccagcccatcagtttacaaaagcggcgccattgcttccagtttgcgttgtatttcatgtttgacgatcttgccagggcgtggctgcacagaatcgctcccacacgcttgagagattgtcgaagggaggtacgacgttcacctgtgtccacgcacaagaaagaccagaccacgttgcccataatggatgagattcagtccacgcccgtgatcccgcatccaccattgtgttaagcttgccaggaatgtggatggcagtgaagaataggccatacttgagctcaaccatagagatcagtcgattgtagagctgcgccgtagggtggcggctgtaccgacgactcgcccacgaaacagcgcccatattgtcgatgtgaaactggacgtgggtgggctgtgtcggaggtgcattctgccagtgcggtccccacaagagtgcggcgagcacagcactctgaagttcgcgtacgttgatcgaattctggtacgacccactctggagctctgcgcattcttcgtcactgtattgcagtcggatatacccacgccggctggtgtccaaagcacacagacctgtgtaggaagcatccatctccacgattatgcacgggggcgtagttgcagcaaactgtgatactagaatcccattaaaccggtcttggttgagcatgaccgctctgaaccaccgcaaatcttcgatggtatcggtgtcaagggcgcgggcgcgggctccgtaaggcagcattgccacggttgccgtgtgggccctctggaaaaagccctagcggatggaaagcacgaggccacgtggtgaaacacaccgagaagcttctggaggtcggatttggaggcacgtccggcattgagaacttggtcgactttggtggtagccctctgtagtttttccgctgggatggatacggtgccgtcggcgacgtcccacattaagccaagcacaacattcttggagcgccacggggtaaacttccggtcattgattgctgtcggccctaacacagtggccattgcttttcgtagcgcaacattggcatcgtggaagattcgaccctcatcaatctcaacacacgtgtgatcatcacaccatacattcccacgaaagggggacgcattgtgggtcgaggagtccgacgagtgcgaaccctcataaatatcattgatggcagaccccgctagagagtaaaaggccggcgacccacaccagccaaagccacaggccaaatcgatgactacgtagtcgtcgatggcaaaagcaaacatgtgcacggcatcctcgtggacaggcacgtgacgaaaggcaccggacacgtctccgagcatcaataacacgtcagcatcaggctgggccgtgcgtaaatcgtggatccggcgcgcaatatcgcggggagggttgtaggagactggcgggatattggagcgatccgtaaagtcgttcaccgatgccccatcaggatatgagtagtcgttaatcatccgtgtctcgttgccggccttgtcaaccactccaaccgggctgaggaatatctcagaccacaagtcgagcacactcgcgttgagtacgagatagcggccatctcgctgacccttgctgatgtgtttgaggacttcggcagaatgaacaatggcgctcttgtgattggagggccgaattacttgccgatccggcttcgacatcgtccaacgtggacgtactccttccctgacaacgccattccactggcaaaataggtctgggttcgctgctgacttgttggacaactcatacaaggctttgttgggcctaccatcctccttggtctgcccgcgtatcagacgcacgaacatgggcagcgaccgatttgaccgatacgccaacatggtgaggaactcgacggagtctgtatcaatcttgtcgtccacatgactggtaggagggggtgtcaaccccagtgcggatgcatattcggccaggttggagagtctgtcccgctcggaaatatcagcgaggcgttgtagtagatgcaaagtacttgatagatctcgaacatctccagtccttgtacacgagcgcggtatttcacgaacatcaatacttgatgcagcttgatctgcacaagcgggcacagcacgcaaacacggggcaccacggacatcaatcactggaacagcagatgatagtcattgttgcgactgttctgttactcctttgtacttttcggtgatgtaggctttcacgatttcaggaaggagttgggttgaaagtgcgcgcgcttgctgtcaaagcagttcccattaccgtcgccggggcagccgacgaccgaggttgccttcatacacaggcgcttgtcaccttgacgcggtagtgcagatagcacggcagctgggatcgatgacgtgcggggctgtctgtagacacggcgggtgtcatcctgaccgtggcgggcccgcggatgggcatgctcgagctcgcgctgagctcgtcggagctcttccagttccaatagaacctcgtcctttcgagtaatctcttacttaccgatactccgggccgcgtcaacgtcgcgcgagacaatcatactccgaaacttgctaaacttgctcgtgatccaaaacgccataagcttccagccgacactgtcggagtcgaacaggccttggtaagagtcgataaagctgatcgcatcgtcaacaaggttcacaaccgtctgagtgtaaaactgctcagcaaatttgcgaagggaccgcaatgatctgctgacatcggtgcgcgaccttgccgtttgaggtgggcgcagcgtgttgcgttccgagaagtccgtaaagctgacagtcgaatcatgggcatttatgcgagtcatcaggatggcagtgcatcagtgagagtccatggaccccaaatccaaagttgagaaggccacggcacacgggtggcacggcgaggaagggggcgtggactcgttgctgcatacgttcgaaaatgtaattacacgacttacctcgaaatcgcgggtgtaaaattgtccggcttaagcgctgctgggtcgctgatggtcgaaacgcaccccgactgggctcattgtcatcgtcttttgagctaggctcgtcgtcctcggtaccataaccaactccatagtcaagaagatcgtcgtgtgccgatgcaccatcccgttccggggctcttgatcgcttaccaagcatacgattctgattgcgcaacgcctggatatcatcatccgttgccttgcttgtgatactcagtaggtcatcaggcatgtgagatgacatgggtcgctgtggtgcagctccggggcctgatcgatcggcacgtggcagttgcgggtcgttgtaaatggctagagcgttcttttgcgctgacccatgaggcaatcgagaacgtgctgccgtcgtacttgcaccgttgccagatcgtgggggcggatgagaggcacgatttcctcgggtatgaagggatctgtcagcatggactgcaccgacgctggtagctctcctcgacgcctgcggcaggccataatcactgtattctgttgcacgagaagctccatggagttgagaaccatgtctgtcactgtcgccccaacttgaagggcgtacgttatcgggtcggccttgatgatgcgaaggggttcacacagtcgtaccgtagtaacttcctgcccgactagcacgctgagcgatgggccggccgccaacatctcgtagcggatcacgactccatatgcccactcgcctgttgaaggaccgctgggttgaacgaacgcgacgggttgtcccacgtaatctccgggccagagttcaacctcggcggcatcgacgacgcggaggtctatcgcagcgactggaagctggagttcgtggccatcctccccggcatcagggcccacaacgcgcaccgtcgcgctatctccttcaacgtggagcacccgaacgtagcagaacttggtgagcgtaggagcgtgagcggggccaatgaaggcgagtgaattggcggaaacggcatacggggacatggttgctggcgtagatgcaatggctggagactaaaggcgcgggctgctcgaagagaagtcgactgaagagacacgtcggaaaccgctaagaagctatttcagcacctcaaggaagaattcaaagtgagatctagactgcggcattcgctggctccccactaatagctacatcagccttaggttcttaccgcctatcggaaaactagtcatcctcacggactgaccctcaaaggattgtgtttgggctgcgaggggctcgaacgctctgcgatggttaaccgttccagctcgtcgacaacagcagacaagtttacacgatgagcctcatccttacaacacattcgccacaccaacttgtgtgcgtctctagatggacagtccggttcgttaaagctaaacgcatcggtctctggggaccaccgcgctttatgtttttttacaacgctttcactttcgcagctccacggcttttcccttgtcgtggcttccagaatgcacatacccaaagagaaatgtccgacgcgattgaagccggttcacctgccaaaatctcaggagccagccaacgtatcgatcccattacgcccgtcgagccacgatcggatctctccatcgatccgcacaagctgaaattggacagcttcgccaaaccatcactgccaatcaaaatgttactgcaccgaagatcgccgtgaacttttacccgctcgtgcagatacctgagacctaatgctgcctcatataggaacttccacactgtgggcttctccatcggagataattctacatgctcgatcagggaaccatgggtgatgtattcacaaacaaagagctgcaagttcggtggagcatagcatgcgccgtacatcttcatcacattggggtgccgtagctgtttccattgcgctacttcctcctccaacgttgtcgcggatgcttctggaacaaacagtttaacgacagcgtcggcgtccaaccacttggcacggaattcacctccaatgttacctccgttacagaagcggacaaattcaatttcagacggagaaattgaaagattcgttgacagtaggccaccgctagaattttcttgggggtgataaaaaagaaatggagtaagcatactccgaacttcttgatggccacgatcacgagctagacgaattgcggtttcttcgcgttggtttctggccttgatgtcaatgcctcgttgttcaaagagataccggacggcctcgacttgtccttgcatagaggctttcattaatgcagtgtcaccgtttttgtttttagcgttcacgtccactccgtctccagtgtctccgttgtccctttccacgtttctatcagtaccacttcgcttcatgaaatagcgaagtatgtccacatggcctccatctgctgccataatcaatagtgtgtctccggcttttgttgtggtagtaaagtccgccccgtactcagctaagcaccgaataacctcaatgtgtcgtctcagcgtagccatcattaaagcggtttctccgtcccagtttgcggcgtttacgctggagcttggttgacgagctagttcctgcacaataccaaggtgcccatttgccgcagcaatcacgagcatattgacgccgtattcatttttggcgtgtacgtccacacccggctgcccagcggcatattggaatatgttcaagtagcctctcttagcagctatcgtcaaagctgtgtccccaaagttacttaacgcggttatatcagcgccatgctcagcgacataccgaaccacttcgacttgaccactttctccggccatcatcaccgttgtgtagccatcactagtttgtgcatttacatctgcgccgccattttcagtgagatcccgaacctttttaatctgaccgctggtagccgcccacatcaggtccaaatctcgattttcactggtagcatccaaaatttctaagcggtggctaaacgcataatagacaccttttgcccacgtaatttacgcgttttcgagcacatgtttccgcaccaaaacgcgtcaaaatcgtcacgttcaaatgatgattgactgactgtttactgtgatatacctcttatatccgtttttaaatattcatataccaaatatattgtcttacaggtttttgcgatcgtatcgcatgcgcgctctcagctttccgcactcagcttgtgcgcattctgcgctcggatgagttctgcagacgacgccgatgccgtcgcaacagacgcacgcatagagctacagccaaggcacacatccacaataggagcgaccacctagcagctttagcgcaccatggggagtgtcgacttggtcgctaagaagcagcacggtgttatcgaaggtaaacacagcgagatgagaagacacttgagcagtagggttccagtttcaaagtaattcattataatatacgcactgcacgaggaggaaagtcccagacagaaaaccccctttgacccgttgactacatccatcagatgagcaacggttcgatctcaacctgtccacgagacagatcgagctttgcaatgaatttgagttcaactttcttggatgttcctccggaaatcctcatactccccctgaactcaagttcctttgcacaacacaatcgccatcttcactaagacgatctttcatcgtataggcgacgatctttcgtcacacagtcgcgatcaaagcctcgagttcatcattttcgaaaatgttcctttcaacttggaagggtccgttcactccccctgaactcgagctgtgtgtcgcgctggcatcgctaccgttgtgattgtttaccaacgtatcagtgcgggagttcgagctgacccacaggcaagatgttaccactagggctccctatcttccgcttcgtgttccgccgctctatatttgtgaattttgcatcacttccgactcaccatttaggtgtccggtccccctaagcctgcgagtcatactcgaccgctacctcctcatagctttagctaaccctcggccgactcacatgtcaccgcgtgcgctgcaccaagcgcacctttcccacgagaactcacggcacaaatcgcacaagatctcagagtgcgcttgcaggacgacagacaccgcttgcactgcggtccaaagcagcacttttcgaatccggcacgaacgtaacaagtgctggttcggatgcccgaactacgcaatgcatctcatcaatattctccatctttctcggagcagactagccacttccagaaaagacttgaggcgacaacacatagctcactttcgtatcgcgttgccgtcatagggtgtccttcccacagcctccagtggtcgttcgtgtgcacaccgtcttgcctgctaccgcaggtgttgccaagcgtcattcatccaccgcctcgtggcccaggatcattcacgtctacccaacgctaagccgtctcagcattgccaggtagcgccaccggcttaggtccgctcatgttgtctcacatgaccccaccagatcgacgaccgcatgacacccgcagcgttgcggcaccatgacaacttcgttgcctgaagtttcgccaacagcaccaacatagtcacccattctcctgtcgatcacgccagcggccaggtgcagcggggtgcttctcaaagtaacaacgcacggcaccaggtgttcgcagtactcgaacctgttctcctaccagtactcgctaaagtacccacactgcttcgacggcaatcattgctcacatctcgctcttggcgctcattacattgcgagtcatcatgatttccttcctgggggctcacagatatcaacgtcaataccagcagcaacaaacacttccactcgcactggataaggcataacccgtccgcatcatctgtcaacatcctcatcgagacgaacatgttccgtcgtattcattgtacccagtctttctcacgcaactgcatccgtagtatccatccacgctcgtcagcaatgcacgaacacatcacgaccgccatgagcacccgtagcagcgtcattatagctcgctattggcactcattcgttgatactctcctgatttacaatgctgccagttatgtccttggtgttctggcatccgcgcctctgacgcccgtaaacttgttcggcgatccgttcataacttcgttggggctcgtccgcacacaagcgccacctggtgtcgccacataccttcgccaaacttcgctctgagcaccacaatcgtcgcattcgtcccgacgccgctgcaaaccactgcgaacgattttcaccgataaccgttccgctaccattacagccacgccgtcctcagctctggcgtcattgctctcttccacagcaccgtcaccacttcgcacaagcgcgtcaactttgatttcgagtcgcccaaactaccggtaagccgcgtccttgttgccgctctagcaatcttacaacattccacctccacgaaaatgttgtccatccagtgatggctacaccacataagtgcacgaatcttcgtccgaaatcaccccgacagaacccccataatgattcagccgacagccaattgcgtgaagatattccatcctttcaacagctcaccacgaccattgtagtcaaccgtcttcgagttccttaccacaagtagaaacttcactctcgtcacgtacacccattgtgcacagcatcacttcacgttactcaatgcatggtctcactttgacgccgctgagaccccaaatcacccgctcaatgtcaccctacaacaaccatctagtggggtcccagccccgggcggaccgtgactaggacttcaatatcactcggttgcaactggtcctcaacgcttacttctgttgactgcaagttggagttgtgccaggcgggacaatggtggctcgctcgacgcccgacgctacgcttaccacggcaacgtccgtcctccagaaccgattaatccgttccttactctcgacttcacttcgtcgagcgataaccgaaccccacaccctctacaaccagcagcgccctgctacgaatctcagcagcagcaagatctacgtcgctaccatcgctcttttgatcggagtgcatgctatcgacgagcaacttgtcccggcagcagcagctccaaaatcgacccgcgttcactgctgctgacatgattataacaagcgggatgacatgcagcgtggtcagctgtccgttctcctctgccagctccatcaggtctccgcgcagcacctccgactgctggcacatcactaagtaatccaccacttgatccaatcttgacgagaacaccatacacgaggcttcgtctctcagtcaccgctatgccccacaaccttgactgcccggtttaacgccacacacacaccagatgccaatacacagtcactttgggctcataacctagcagctttagcgcgccatggggagtgtcgacttggtcgctaagaagcagcacggtgttatcgaaggtaaacacagcgagatgagaagacacttgagcagtagggttccagtttcaaagtaattcattataatatacgcactgcacgaggaggaaagtcccagacagaaaaccccctttgacccgttgactacatccatcagatgagcaacggttcgatctcaacctgtccacgagacagatcggctttgcaatgaacttaagttcaactttcttggatgttcctccggaaatcctcataccaccagccgtgggaccccagaagcagcaagtccacaccgctagatgcaggaacctcattgggcacttacggtgatggccgtcgcaagcagctggggccatcacgagcactccgtgcggttgggcggtcaaggccctaattatgactatgaccgaggcatgggcaacaccttcaccgccggcggtgatgtttccgctgtcgctggagctggctacgattccaggggtaatcttcgcaacggatttgttgctttgctcttaagtggtgatagtggtggcggtcatggagtccgtggtgacgtacgtgatgtgcagggctataccagtggcgacgtcgagcaaagctggcgccagctcagtaaggatgctcggaacctcgacgatgccgagcatgaaatgcttgtcgaccaaggttacggcgagcgtgatgacgaacatgatgaagccgaacaaggtgacgaaggacacgctgacgatcactcaacgacagatggtttttttcactagagctggaggaacagatagttgaagcagcagagaaaatattgcgccagacgccgaggaacagcatcgatacttgggtgctgtatagaaggcttctccgttatcgacacctaaaaatgctttcgcgtgctgtagcgtgtgcgctagcaatgcagatgcgagatcacgaaaagaagacacttcgggagcaagttccagacatccgatttaatatcaatcgtttgtcggagaaggactgtatcaaccgctttcggttccgcaaggtgcatttagcctatttgctgaaccatttttctcgactgaagaaggatatcgagtatctggcatcgaggcactgtgtatcacgctagagcggatggggtatccggcccgctggagggagcaagtgaacaagttagggcgatcggagagtaatctcagttccattttctactatgtatgtgagcgaataacttcgcgctgcgccccgctactgaaaggagattgggatcgggttagtgcgcgactggaaggcttcgcatcagctatctacgcaaaaggatcggcgctgaagaatctgtggggttttatagacggaacggtgaggaaaatatgccgtccaggagatagcatcgagcagcgagcgatgtacaacggtcacaagcgttctcatgcagtgaaatttcaggccgtgacgacacccgatggaattatcgcgcacatgtttggtcctgctcaaggacgtgcgcacgaccttacgttgctggaggattcagacctggagaatataatcggccgtgatcagcgatttcacggctacctgctctacggcgaccctgcgtacggccaggcggacgtatttgcatctccttttgacaaggtgggagcaacaagagaagagattgaagtcaacaggtcgcttagcaaagtgaggatttcggtcgagtggatgttcggcaaaataattggtgaatgggctatgctggacttcaagcgcaaaatgagcattgggaacgttcccgttggtacgctttacgaggtcgccgccattttcgctaactgcgtgacgatcgcacggcaccagaatatcattaacagctactttgatgttcgcccgccttcatttgagaagtattttgctggactgacaagaattagttggaaaccaaagcaatagtttattgatgcctctcgtacggtggcttactcgttagcaaaaaaataacttagctcgtcgctgaaactaaaaagaatgagagatggtatcgatgtgatcacgctaagcagcgctactgcggttggcgcttccgccgccgaaatgctggagaagcaagtgcgtcgtgttacccagcgtctcaacggctttcgccagcgcgttatctcgagcagcttgggccgctcgatctttgaccatcatcgcttcttcccgcgcccatatttcgcgaaggcgcgtcctgccgaccttgtggccggattcattctcctcctcgtcgttgtcttcttccgtctggtcgctctcttcgttatctccttgctttgtttcttcatcgctgctgtattcactccccagcatacgtcgcaagcctgtgcgttcatcgctggcagcactctcagcttcgcttgcgtcgtgttggacagcatgctcgtcgtgatactttttgtctggaacccccaatgttgctgagagggaagtaatccgccactgaaacgcatgcatactattggtagtggcgcgagttaaagacaatcgcaaaacccgtgtacgggtcttgcccaggcgagatcgtcgcggtttgatagaactcagtaacaagtgcatggaaccgatcgaacagtatcgggtggtgacttgactcttgtaggcgcacctgcacgctcattaactcgctgaatactcggcaatactggacatcgtaacagttttccatgtactgttcaagtttcagccacgcttctttcagtcagtcgtccatgctcaccaatagaggtcatagactctgtgtcttggtccagttgggtggcggctccattagcggccaagcgctccagttcatagacaacaaaagacagacgggtgagttcacgagggttatgacagcacatgcggcctaccaaatcacttattccagacgaggagagtaccggaccatccatctcagaggtccaagtctcgtcatgttcttccccagccattgcctccaaaatgcacattcccaacgaaaatacatccgactcgaacaaaggtggttcccccttcaaaatctcaggtgccatccagcgcatgatcccgttaaaacaacgctgagacggctttcccgtcctccgacttaacccaaaagtggacaactttgccacgccatcagtatatttctgcaacgaaggtctctatggacgattccccgttcatggagatattcgagagccaacgctgcctcgagcaggtacttccagattgtcgggttttccatgggaaatggcgtaccggtaacatactcccaaagcgagcctccactggcatactcacataccaagagctgtagctgaggatcagcctggtaccagccgtacagcttgagaacattaggatgccgcagtcgctgccattgccgcacttcatcgctgaatgtggaataagacgcttgcgaggtgaagatcttcactgcagcgtcaacaccgagccactttattcggctgtattcacaccccatatggccgtccgtactgatatcgattcgttcgatctcactcagaggaatggaagacattgctggcgaggactgattaccaatgtttagatgattcaatatgtcgctggcatcgaacggagaagcaaaggggcgaatacttagaagaaacggcgtgagatactgcacgatatcagcgtatccattgtcagatgccacttggactgctgtttcgcgaagcttgtttctggcatcgacaatcgctcggcggtctttcacgagatatagcacgatttccaggtggccaattccagacgctatcatgagtgcagtatgcccgagttccgcagacgcattcacatcggcgccagcttccgagagaaattggacaacatcagcatgtccaactttgcacgccttcattaggggcgtgaatccgaacttgtccttcgcatccaattgaacactgcgtagtccagcaagatagcgaacaacttccgtctgtccgcttcttgcagcccacatcagagccgtatacccgttcgcgttcgacacgttcgcgtcggacttgcactttttggtaagaaaccgaactatctctgtgtggcccccttcagcagccctcatcagcgccgtgtctccacagtagtccgtggaatccaccgcggctccgttggtcactagataccgcaccaccgacatacgcccctccctcgccgcccatcgtagagcgttgtccttatccacgctggtgccttgttctaccagagccttcaccctctccagttcacccgccctcgcagcttccaagagctcgttctcctccatctgggtgatgcggggagatcttaaatgaggcgcctgtctggactgattcatgcccgaggactggccctcattgcgggtacttctctgtcccaccagaaaatgcagtaaatttttaagcatcgatatctagtagatggaggaaaacggcattgcatagatcgcaacgattgcttcgtccactaattttttcagatcgccaggaccaatgttggcggggatacgatgagatcagtgccgccctgccagtggtgatcacgttttcctccgtagttcatcgagtattcattattgttgacctgggcagctggtagcccagtactgtaaaggtcggttggatgcattccccgcctaaatcgattgatggcacaccacttacacaaaatagattagattaaaaaattcattttggagggggattgcggtcgcaatttttcgcgccaaaatcttcttgtggtaagcactggggaatgctacttcccctccttcgccatacaaaagttgtgaccggcacctaggtatatctgcactctgctcggcgatgttttccacctttcattcgttgctgctcgtagctaggcacgctgcgacgaccatacgctccatggccctcgttaacccaggttcgttctcgagccccataaactcctggcgcatcctttccgtcgttaggtcaagtagtagcacttcggtgatgtgaggacacccaatcgttgttggcactgtgtaccgtgtagacgcgcggtgaagaaagctttgctgcacctcgctcgaatactttgtcgcgcaaatgacaaggacattagtcatgttcccgaacttatcctccacctcaccgaggttgcagaacttgtacttcatctgctcggcaatttcacctaggagtttgcccacaccctcgtgcatccccacgttaaccgaagcgttcctgcccttcaccaggtcaacgtacatcacgctcctctgcatgtcaccctctcgcatcttgcctctgcgctttcggggaagggctggctgaatatcttactgaatccatgacatgttactattgtgaagcacgaaaatagtatttccgtgtattttcctcaatgcgttttcacgctcgatactattaacgttattgacacatcatgccttcggtccggtagatatgcctgtcaaagctcagcatgtacttgggtggtagtctccgtccaagctgcggcagaatgaaggcgataaaccacagcgcgtcctgcctgccaagcatccgagccagtgcatgccgcaccgacgcagcactaaccactgacagtttcagcctctcgccgtcgcgctgcataaactcgatggtgctctgctctgtgagcaccagatacacgtgccagccccagtatccgcagaccacgacgcccaccacggtcgtcgccatgaaggagaagagcaccttgaagcggtccagcacaacgttgtccctgccttcagcctgagcgtccgcgctgctgctcgtgaacgtctcgacgaagagcctcgccgacaacatggcgacgtacaagcagctcacccagatgtagagcagcagcagccagaagtgccctaatacagccgaacggtaatattatgtgagcacagtacagcccacatcgagctcatagctcgttatggcgtaataacgtacggtagttgtggtacccgacgcagttgttgagccaggggcagtggtggtccatctcgtagacgcatcgccggcactcgcggcagtggtgcgccctgggcggcttgggcatcttgcagtgctggcagatccgctggtggtcgctgccgccatcgcagccgtcattgggcgccagctgccggctcaccacgtagccggggtcgctccagacggccagcgagtactgcagtagcagctccgaggccaggaagacgctggccgcagcgtgccacgggctgcgcgcaggcagaaacttgccgaagtgcacgcaggcgatgcccaggatcagcccgtagcccagcgccaccagcagcgggcccagcagtgacatcgccgagtgacgcatggcaccaggtgtatgtcgccaagtcgcatgtgtatcagggacatctccacgggcgcattggccggatgcgtccgcttaaatgtatacgtccatatacgcacacactcctggatatcaattgtatcaggtgagagaagtcagtttctccaagcaacataagggttagagcccactattcgggtgatttcagtagtcgagaatgcggtcttgcaggcagtgctatacgtactatacgccattactcaccctctcagcggccgcgcttcccgcccacccaagcccggccccccgctatcaaccaaagagcggcgcgccagccaagtaagtccagccaagtcgaagggaaggggggacgaggcttacacccgcggagtctcctggtccctacggtctctgcggcgttcagctcagccgcctgcgtgtgtgtgagagagtcgctctctcggaaaagcccccgagaaggagaacgaggagagaagggagtgaagccatcaatcaatcggccagccaagaggagagcataacaaggtgaggagaccagctcgttgattaaggaggggccgatggatggagagagacggatggacggaggagagaaggagaggagaccgaggcacgggatcacttcgcaactggcagaccacggagctgcagtatacaggggacaagtctctcctcctcctccttcccctttcgtaggagacctccccatccgtcgtgcctctgagctctctgggtcaggagagcgccccttgggtcgcgtctgcttgcgcgtaggtggctgacgtttgtgcttgatggtgctatgctttttttttctgccaggcggacgacgtgattctcctcctttagtgcggagcctttttcttcttctagcgactgagtgacgtcgacgttgatgacgatggagtttgcgcctgctagcgtgcccgctgcaggccccggcaagctcgcgtacggctcgccgcagacggacaaggacagcagcgagcacggcagcgacggccaggcggcctccacctccacctcctcctcgtcgcggcccggctcggcgcctcccagcctcagcttcgagtcgtccaacctgttccgcttcggcagctcgagcgacttcttcgcgcccatgaagtacagcgaggatgacccggcggcttcggccaacggcgacaacaacagcagcagcaacaataatgctggcaacaaggcggggagcggcgctgcagacgcagggaacaacaacgacgtgctgccgccgcgcgcgctctcgccctcgaatcaggcgacccacgcgcgaggacacgagcgcgaggaaggagccgctggcggagatgacggacgagctggagctggagatgtggtcggacgcaccattgacatcaagatccgcaagccgcgccagcccatggagatgctgccgtcgcacaacagtcgccgcaagaacagcatcgagatgttcctctcgcagtcgccgagccaggcgctgggcggggacttcctcaagctcagcctggacgaccgccagatgagcctccaagcgaatgagcgcgctgctaatggcagcgtgtcggttagtggaagtgccgcgggcagtgtcaactcgtacgcgtcgggccagttccagctcaacccggtgcaggagtctccgaatgaatacgcgtcgctgtctggccgctatcgccaccagcagcagtcttccgccgtccagcaacaacagcagcagcaggagcgctaccgttccggtggacgtgacacgcagcaacatctgccgacgtcgctgtctctttcgcgctcgaacacggtgccaggtaccagcagcacagcgtctggtgcatacaatggagcgtacaccttgagtccgcggatgtcgtccgaagactcgtggtcgggcagccaggacggggacaacaacgccatgtaccaggagcaaatgcacgactactacggcaataaccaaatggcggcctcgtacgagcagcagtaccgtcaacagcagcagcagtatcggtctccgcagactgctaacgggtcgtacggctacggtggaggtcaaggtcgcgcgcagatgaactcgggccagtggaacccaatggttgtgggaccgcaccctcctaccggcatgtacgacggtggaaacagcatgtacatgaacccgcgctccagtccgatgacgcaccagcacacggcgcagatgggatacgcttcgcagcagcaagtctcaatgggaatgcgtggtggaggccactcgaacagccgtggacagggacgcggtatgtattcgcgcatgaccccgccgcttccagagtcgtctccgccgcactcgcctcgcaagggcatgggcatgggcggaggcatgcaaatggggatgaagcagtgcaagttttacctgcagggccactgccggatgggtagcaagtgcaagttcgtgcaccaggccggtgctccgtccgcggaccatatgggcagtgctcacaactcgagccgtcaaaatgcttccatgatgtaccagcaaagccggatgatgatgtcaccccctccgtcgcacatgatgcagcagcagcgccatcaaatgggcagcgatgatctcggccaccagatgagtggagggtttggagggcgtcagcagtctcggatgggataccgctcggaaaactcgagtgtgggtgggatgagcttgggcctgatgaacggcggtgggatgagtgcgcctatgatgggcggcgctgccaatgacccgtccagcttgagtgctgctctgagtgtggaagacatccagaaccgtgtgttcgctatgtcgaaggaccagaatggctgtcggctgctgcaagagcaacttgactacgaagaccgcgctgatctgtgtgaagtgatttaccaggagtcgctggagcaccttgctgagatgatggtggacccgttcggtaactatctcttccagaagctgctggagcgtgtgaacgagaagcaacggcttgtgatcatccgccgtgtgagctcgaaccttgtggctgctgcgctgaacttgcacggtacccgatcggtgcagaaggtggtggaggtttgcgcgacatcacctgacgttatcgaggaggactatgacgacgacgacggtgacgagtatggctatgtgaatgatcgtgaggagcgccctgagggtggcgagcgtcgccgaacgacgagcctgccggatattattgtggaggcgctgaaggatgacgccgtgcgcctgtgtattgactcgaacggcaaccacgttatccagcgtgcgctgcagtttatgaagcctgagtacaaccagtttgtgttcgatgctgtgtgtaaggagtgcacgactgttggcacgcaccgccacggttgctgcgtgctgcaacgttgcctggacgcggccaacaaggcgcagaaggctgaggtgattgagcaagtggagcgccaggcgatgaagctgatgcaggatccgtacggcaactacgttgtgcagtatgtgctggactcgtgcacggctgaagaggccttcggtgtcattatgaagccgttgggccacatctacgagctgtcggtgcagaagtttagttcgaatgtgattgagaagtgtctggagaaggcccccgagcgcgtgcgtcaaaagtacattgcggagatcacaagctgccccaagatgaacaagatgctgcaggaccagttcgccaactacgtggttcagcgtgcgctctgcgtgtgtgctgaggagcagtgcctgcttctcgtcaaggccattcgcccgcacctggccgctatgaagaacacgtctggtggtcgtcgcattactgctcggattctcaagcgcttcccgaacatggacatcagcatggacatgggcatgtcgccgactgccgataatttgttcgataatggcgccaacgggatgatgatgggccacctgccgtcttctgccatgggcggtgccatgggcggctacatgcaccagcagcacctgcagtcgaaccagatgtacggaatgcagggcggcggtcacatgggcgcttctcatcacttccagggtggaggccgaggcaaccgcatgcagcagatgaacgacggcagcatgatgatgctaaacgatgtgggcggcatggggatgaacgccacgagtcgcgcataagagagcgagggagagtccagcggtggtgggatgaaaagtatgaaccagtgttagggaaggagcgtgtggtgtatgaacgacgaagcagcgaggaagacccggtacaaacgaacgctggagacgcgcagcaggtgtgaagaaggatgggtgacctgccaccagcgaggaggacgcgtgggtatgatgatgatgacagggcaagaagagggaaactagtgacaagaagcagcaggaaaaaggatccaaaagttttgcgcgtttgtagataagacaagatacaaaaagaggagaatgcatgtttaggaccttgtatcaaagcaaagctaatgaagagtcccgcatagcggtgatggcgagttgcgctgcgtgcgtggcagagtgagtgggcttgtgtaggtgacaagaggaacacaacactatgctgtaccagtaagttgactcgttgaagccataacaatgaacgaaaatgctttggaaagaaggatgaggcgtctatatggaatttggcatgcactctagaacttgtagcgttggatggactcgaggtggcgcaccgaccgtgggctcttggggcgggtgtcgtcgagacggccagatttgcacgcataaatcatcagcgcgaggctcagcagcgccttaaacgctgcaaggcacatgaagaacgcgatggtcaccagaactccgctaggcgacgtgaattcgattggcacgtccgcgagtgccttcgacaccatgcgcaacacgacacaagccaaaggcagcgacatcagacccaaccgcttcgaaacgtggtgcgtgtgatccagaatcgtatcctcgctcttccaccccgtcaagtcccgacacaggatcgtgatgaacttggagtacatcgtcggcggaagctggttgaacttggtgatgaaggcgtgcttgagccagtcgatcagcatctcggcaacccaaaccatggcctgcgtcagaacaagccccaacgtaagcacaccaatcgagctagaaaaatgcaataatgaaataagcgtaccgttccccaggcaacatccccagtcgacgattgcagcaggatgagactgatgatcgtgatcagcttgaagcgctcgacgatatcgctgcagctgatctggaagaggttctgctcctcaaatttcttgaacacagagctcttgagctcggcaaagttattcgaaatcagtagtgtgagcagcgacgtgttgctcgagttgactgccacattgagagtcacgacttgtgcgaacagcagcagcgagtggagcaccacgtaaacgatcgcgacggtgaagtccaggaacatgcgcgtgacacggcgggggtgatacttggccgtgtagtagagcgagtcgaggatatcctgtcccagcgatgagaagagtctgtcgaagatctcaatcatggtgaagagcacgtagagcttgatcattgcctggccgcggatcgcgtggtagactcgagacatatccacgttgagcaatacactcgtccccacagccacaatgaccgccaccatcaagtcgtagaagtgcgtcctccggagtactctggtatggaaactcgacgtcacggcgcacccgcacgcgaacagaatccgcagcggaaggtacgtgaacacgtacaggaagctgtcgagcgccagcagcacgccaaagaagaacaactgctccgtgttcacgggcacgacgaagaagttctgcacgcgctcctggtgcattccatccgtgggtttgatgtcatgcacaccgaagatctccttgtagaagaagtccgacaggcggaacgcatgcggcgccgggggtttgtccggtaaagtcccagcccccgcagacctgggcgaagatgccggagccagcttgggctctgtgtctgctcctctggctgtcaaagggtagggagagctcctggccagcggcgccacgggcgagaagctcgacggagacggcggcgaatacgtcgccgagaagtccgtctgcacgtggagattgggcttgggacggccgttctgcgtcgcggctggcttcataactgttgcatccagtactggggctggtttgacgtggccagaggctaacagggggctcgttgcggcgctggggggctcaggattcgactttttccgcttaacggagctgctggggacgcccgcgggcttgtgcgctttacggcgaaccacgcgcttccggtggaataaagttgcggaaacatcgagatgagacggcttccttgatggttccggtgcggataggggcgggggcgctctggggagctccatggacggcggcgaagacggagcagcgcaggtcgacaccatgtcgtgacccaatggagaaattttttgggatgtcactattggaatgtcactaaagtgagtatgggttaatatgtagccattttgtgcgatgttgaagtggaatgtgtcggttcatgtatatctatagtgtaacgaacgatggccacctcgaccgtgtcgtggatgaactcgccgccgctggaccctcgtgtgctggcgaatgtggcgcgatcgtatgagggcgagacgctgctggcgccggagtgcgatgtgccggtgtaccatggcaaggggaggctggagttcaagacgggcttcacgtacgtgggcgactttgtgcacgggcggatgcacggcacaggacgcatcgagtggcacgctagtggcgtggcgtatgagggagacttcacgcacaacgagatcactgggaggggcacgtactggtggccgaacgggagctcgtacgtgggggacgtcaagcgcggcaagcgccacggccgcggagtcttcgtcactggagaccgtggagttctgctacagcaagagaaggggggagagggtcaggagcatgaaacgagtgaggcgggcgatgaggtgcccaagccgctactcttcgccttccgctctcacgaaacagagggccacgacgtcgatggaggaggcggtgacggccatgatgatgccaagggtgaggatgatgttgggctcgtcatggcccagagcaacgctcgatatgacggcgagtgggagaacggactgcctcatggctgcggcgagctggtgtttgacgctgcgcgcaacatccgctacgaagggcagttcgtagaggggaagcgcgagggcaaaggccacatgcactacgcatacggcagtgtgtacgtcggagactggaaggctgacgtcaagtgtgggcaaggcgtgatgacgtggatgaccccgcgaggagacggcgagttgctgaaccccgaggactcaacaccgctcgagcggtacgacggggagtggctaaacgactaccaagagggctttggtaggcacgtgtggctcgtgaaccccctcagcgtatccgctactggatcaacaagtaaaaatgtatctctagcttccagcaacccacacgacaagaactggtacgagggcgagttccacgaaggactgcgtcatggacgcggtgtcttcttctacgccaacggcgctcggtacgaaggagaatggaaaaccaacgtcaaagaaggctacgggctcttcttctacgaagatggtcgcgtattcgtggggctctttcgccaggaccgcagtgttgaaggcagctacgcaacggcatccaccacaaccggaggaatcgttccagtttcccccgtgaaagcagactcggctgagacgaacgtggcatcaaccgtgatctcatcttctcaacctccttcatcttcctcaagtgttgcaggaatcatgttattcatcaacgacctgcttccaatatcggacatcccaaagcgagaaaaagctcgcaaggctgtggagcatgcagcgctacgtatcaacacggaattgcgtgcactgtatcgcgggtgtatcaaggagtctcgacggtcagcctcctcttcctccaatgatccggatgagtcggggacgctgcttgaagtgttcgagtgtcggcaactgctctcccagtgcggcttctactttacgagcgggcagcttgaaagcctcatgcaggaagttcggagagctcaacgatctggtgccatggcctgcgctgcgtcaatgaacattgccgagtatttccttgaagacctgcctgtggagaaccgagccaatcacccactagatccaacccgtctcgaaattgttccttgggacgaagttcttctcttcagggagtttgtggagctgtttgtccgcatcgcacattcgtgggtcatgagcgcagaggcagaaggcattatcgagctggctgggagcagtgacagcacggtgtttctggcggacattttctccgacttctacgagcaaatagtccgtgaacgccaagaagcgctgagtcaaagctcgccgtcatggttagccctgttgcgggcggagctgatggggaaaaacctgcacatcgtcttcacgaagcaccacgaccaactccaaagcttatacagcagttgcgccgctccttccgttcgccgtcagcacgaagacgcagttgagctcgatgatggcgaagaggaacctgcaccaacggacaagtatactgatgaagtgtcagtcaggtccgtgctcgtcatgcttcgtaatcagagctccccggaatcgcccatcttcaccgcagactttcaggtccgccatgcactcgcggcattgaaccgagcgttcacggcatcagcgccatccttgaaacccgagttacatcgcagtgttgctagatccagcgctactgaaaacaaccaggacggcgagccagacgcgtttttcatgagcacaacggtggttttctcggagtttctggacgccatcgccatcgtgctattcaccaagcagcacatgaagctggagtcggcgaaaaagactccgagtaagcagcagtcgccccaggagctaccgctccacgtgctggtagaccaattcatgcagacagtgaaagtgaatgcccatccattactttaaactccccaatctaccgacacacaaggcgcctcctctcttctacataatgttgtctccaattgcagtcttgcttgcgtaggaggcgtagggggctcaatgcattaacgtgtaaattggatgtttgaagcacacgtgcagactattctagcgctcagatatttattgttctcgaaccaccgtggcaaacaaagaaaactattgcatcggattgacgaagagttatatgcaactaactaatgctcgaagcttctctgccagactttttcggccagatgagtgagattgtcgtgcgtagctctatttccgtacttttcgatcagatactccagctctactgtagatccaccgaattggtccgaagaatggaccgtgtgagaatctccgaatcgactcgtttcagaatgggtctcgcgtccatctgttccgctttgggtcggttcgctccacgcagtgaggccacgacctcgaggaagactgaggaggcgaacacccgcacgacttgaaacgcacttggtagatattagactaagctcctactcctgcacatgcacgttgggcagcgtctccagagctcccaaccactcgttgcacttcaactcctgtcctcctcccaggaccttgtctctccttccttcggcttcttccagggcagtgtccgcaccgtcgctcctgcgacgccccctccagtgcgccaacgcaccaccgtgtgggctaacggctgcaaccggagccgattcataacaccatcatgtccacaagatcaatccaaagcagctttccctcagtgaggatcacattcgatacaatgtggatctccatggacaagtccttggcgtggagctcccatagcagcccaaagaggtttcgcacttcctgtcgtgtcgtcggtcgaggcagaggctccccaactggagacagcaataacgcagcggtgttacgagtttcaatgagctccaaaaacgttgccgtcaagtccgtgtgctgggctttcttccaggcatccatctctcgataaagacgtccaatagagcggttctccacgatttttagtgcgaactcctggccttgccgagtcaccttgaacacgcgtccaaaagcgccacgaccgagaaatgcatcaccctctacgacatcaacacccaatgatgagcagatactgtttaggcgatccacccagggagacgtgttgtccatcatgaagctccgaagcaactctctcgagcccttatcgacccacttcgccgtttgaactttgaaaacaaccgaatcgcgactattgatcagccaagaggagcggcggtcagaaaatggcgcatgctggcccataagggtcaatatattccagataccgcaccactcggccaaacgcagcatcgctataggtgagggtgctttcgaacaaaatgacgcagtcgaacagttgtcgctctgctactccaacgcggaactcttccgggccactctcgttcggtactcgactggagcggtacatacctttgtgggtcgcaaatacatccggtatgagaccattactcgtgctcactcctggcagtccgaggcagccgcgggtatctctcgctaatgataaacgccataccacagctggataataccctgctgaaatagggagtaatgaattcgacaaaatcggcctcggtcgtaatgtcatcggcacgctcctggtcctgctccgaccaaaatgcttctctttccttcgtaggtgcagcgtcgaagatgagttcgtgtgtttccaatctctgtatggtagtttgatccaatgctcgatcacttaaggaccccgacttcgactttttgtgccttaaagaggctagcgtttcctcaactcccctctccatgctctcctggtggctgcagtttctaagtagctcgaggtagtctcgagatttcactcatgttctgtcgttaactacgccagaactgagtgattgattgaacacaacgttggagattgttaaaacaaaagtttagactaacagcgtttcgccaagtttttgcttaagcattgctagcactgcgccgtctttcaataccacacagatggcctagttcacacagcctcgggattcatggcctaggtgtaccgtgatagcaagcggatgccagatcgccatcgaacaggtgcccatcgtatgcatagcgggcataacgacaaaacacataagtgaatttatgaaatccacgaacgcgcgaaatactttgaagtacgtacagctgacgacatgatcgtgcatcaggatctaagggtgaagccccaagtacaatttgactggcagggacccagtgcatttgattggaatccagtctgcatcttacatactgcacacacatgcaaacagatcaaacgccgtcatgcatccgttgcttactagaaagtggaaccaactgcatgcgatgaaaatcgttggctcggactgacgaagacttgcaacctagacttgtaagtaagacctgaagcttcggcagactttttcggccagatgactgaggttggtttgcgtagcgctgctgccatactcgtcgatcaactgctttaactctggttccacccaatgggtccgaagaatggactgcgtgagcattttagcaccaagaagtttcatagttggggtcgctttcactgctctcacaaggtcaatccagagcagcttccctccagcaataattacattcgctacgcgaggatctccatggagcaagcccttggcgctccccaacaggagacggcaataacgtcaggtgtttcgacggattttacaggactgatcgccaagcctgtgtgctgagctttcgtcaaagcctccttgtcctgatggaggcggtcagtggagcagtcctccgcgatctttagtgcgaactcctgaccttgtcgggtgagcttgaacacgcgtctaaaagcgccacgactgagaaatgcttcaccctctactacgtcaacgcccaatgatgagcagacacgctttagacgcattacccagggagggatgttgctaacaaggaagccctgaaacaaatatctcgagccctccgtgactcacttcgccgtttgaactttgaagacgacatcattgtagctgtcgatcacccaaaaggaccggcggtcgaagagaatggcgcttgctgaccccctggagcaaaactcttcaaaataccgtactactcggccaagtgcagcatcgctaagtgtgagggtactttcgaacaaaagacgcagtcgatcagttctacctcgacttctccgaatcgaatatcaccatcttggcgttgcggggctggcctggagcgatacatccctgggtgggtcgcaaattcacccggttgaatgtcagtacttgtgctcgctcctgcgcgtggatatctctcgctgttattgacgaacaccatactacagctgcatagaatgtcgttgaaaaaggagtaattaatgcgacgaagtcagcctcagtagtcatcccatcgacatgctccggctccttctccgaccaaaacgcttctccgtcccccatgggggccagctcggaaatcagttcgtgcttttccaatctctgtcgggtagtttgacccaattcttcatcagttacggacccaaactttgactctttgtgcttgagagccgccgcgctttcctcaacttgcctctccaagcgctctaggcgtacgcgatcttctcggattattgcaaataactcgcggatgttcttgcctttcggcaccaccactagcacgtggacttcgccctcgcccgggtgaaaatcagctccaaaatatctcttgagaacccgcgtgccagacattgaatccttgtgatcgcgcagcgttccatcgtcatcgcgcgctacagatgccgcactagaccatttcaaccacccgtcgaaagtcgtcgtcctcgccagaaagagctgcaggtccggtgcgtcaacatactccaacttgttcgcgttctgctctctgaccttatccttcatcttgcacacgctgtcaccgtcgtcaacctctacctcgaacgccgacctctcgccaacaattgcgcacattaagcggagcttcaccatttcgaatgagatggctaaacggaaatggtattcgtagactaccgaacacgatatggtcttgaggcgtccatcatggaaatattagcaggcaaaaaaaatgatgtgataggtctgcacgcttgaaccgtgggataacctgcagcaaccgacaagagatgaccattacatccgtcctcggcattgcatcccggtcggcatgaacacccaccttcatcgatcatttttcaggtccgtagcgcacggcaccagtttccattgacacccgagccgagcaccagtgacggtaaccacgacgcagagcaagacgcctttatcactacgacgctggagttcgcggagtttctgaatgctatcgccatttccttcaaccaacagtacaggaaactggaatcgttgaaaaagatcgagcaagcagcagtcaaccccggagctacatgctggtagacgagttcacacagtcagtgaaggtggaagctcatccattagtctagactttccaacataatgccatccagcctctagcacacaaggtgcactctctcatctaaatcacgtagcctgtctagtaaacactgccaacggggcccatgacctgagcgtaccgcgacggcaaactaacagcctggtcgtcatcgaaagtagcctcgaacacctggccgtcgtatgcatagcgaacgtagctgcgtaacatacacatacatgactatatgagcaacacacaatacaaacaagcgcgaagtaaatacttacagcagcggcttcacggcggagtttgcgggtgatcgtgcgtcagcaatagtctgatcaccatccacgcacgggttgtagaatcctagcagtccagcctttgaagacgagttcagcgcaagctctccgtcctgaataccatcgcagcagcacaaccaactcagttagccttcgaccgatgcacaataaaacaaatgctgtcttaccttgacgaagaaccgcagcggaaccgtcacatcgatccacctctgctccagcagctccgcttcctcctcctgctgactaatgttgtcaccgcttccgatctcttcgtcgtctccaattgcacggttcaggtcctgttcccgcatcgctctcagcgccacatccagatcatctcgacgcggttcgcgcgactccgggctagtcgggttcttgccgtaccgagccagcaaaatcaccaggcccttgccgtcctcccgctgccgttcctgctccaccttctcatttgcacaccgctgcatcagcttctgctgctccagcgcgccctgtcgagctgctgcaaggtactgcacacgcatatcgtgacggtgctccagttccagacgccgcttacgctcctgcgcgggcttcaccagctgcgtgacgacggccgcgaccacgaacggcgacgtggctgcacagaacgtcgcgaacgccgactgcgcggagaacggcgacaggaaaatgggcaccacaaagcgcacgctgccgcgcgtgaagcccacgcgcagcgtcacgcccgcgcgcgccaacaaaactccgagcgccactcgcgtgcggttggaaatctctcgactggccccggcaacgaacgacaaacccatcgcaagactcgcgcgcagcgacaccttggccgtcgtggctgccatcagcgcgcgtcggagctggaaggacacgttgggtccggcgccattgaccgcgaccgccgcggtggcgttgtaggtgcctgtgtcttgactgagcgaggccgagattccgtcgcgcgtgctccacatcatggcgccgtgcagctcgggcgagagcagctggttggcgcccatggagatgtcaaggccgttgtcgtccagctcggggatgatcatgaagaccgtgtgcggcgacacgggctggctgatctggcagtgcagcttgggcatccagcccagctcgctcgagagcgtgaaggacggcacgctcgggtcgaacgactggtgcgccagctgcatggtgaagctgcccatgcccagcccgaccttgtccgccatgtagccgcccagcgtgagtgtcgtgttgcgcgagagcgggaagctcgtgcgctggtggatggtcatctcggagcgctccacgtagcgcgcgccgcgctggaagaggctgcgcaggccgcgcatgggcgcctgcacgaactgcgacgcgtccacgctcatggacatctcgctgaaggacgagaactgcgcctccagcgcctgctggttggtgcggcgcagcagctcctccacgtagcgctgcagctcgcccgccgtctcgaggtgcgcgcccagcgcgcgggaccgcgcggcgccgtcctgctccagcaccagcacgccgcgctcgccgtagacgtcgtaggcgcggcgcttcagcgggtcgcacagcaccttgtacgcgcggtccagcgccgcgtactgcgcgttggcggcgcccacgaggctcgtatcgccgcggcgccggtccgggtggaactcgcgcgacagcgtcaggaagcgcgcgcggatgtcgtcgctggaggagccgcgcgccacgcccagcagcgcgtagtagtcgcgctcgaactgccgccagtacgcggcgtcctcggcgccgtgctccgccatgattgtcgtgtgtggcgtgccggtttggaacggcgtaacgctattattgctgatacgaacgtcgtaaaaaactgtgttacccggtatgtcagatacgaacaccttggcttcgtggcagagcccaaaacaaaggatttcattagtcgcatcatattttgggtggctccaacacaaattaaacttttgattgaccaattacaggcgtgggaggggttaatgcgatcctgtgattggtcgatcaaaagtttaatatgtcgagacgtatatttcgggtatgaaagttctcaataaacatgaagacaatacttaactaagtatgtattattggctagagccatattgaaaattattattattgcccggggatacaaagcacatacatttttaacaatatcaatatttcaatttcatgctaattttaattagcatgaaattaaaaactaatatattattaataattataagtggcaatcgtcataaatactgtttttcaattgaaattaataactgaattggagcccctggttccaacaccttgcaggggcgacgggcacgccgctgtgcgcttgttcattgataatgttctacaccatcgtctgtcagacactctgtttgaccaatccgatgctgtgaagatcggaccctggtgctaggaaaaggcactcaaaactcaaaacgggagaacccgttagtagtacgaaaataggcctactcaacgcaaactattgtatcgcgcagtgtcgtccgaacggcgccacaggattaatttccaggtggcgtatctgtcgtactcgacaacacggccagctgaaaattaatccttctgttattaaaaaaaatgcgatgaccccgacgaatcaattgcataacagtacggtcgaagcttagcttgacacatcgcgtttgaacttctgcactagaatatcaaacttcaaaaacgcgcagttaattaaacatctaggagttgtttgatctgttgtaggttgtttgtacactacagtaccgtagttgcttagtagaggatcacgtggatagcgccgttctactgtaccatctgaagagagctacctattcgcgtagacgatagaattgattggtattgcagccgtgggggtcatcaccttgccctccaccagtgcaaccaataacgtcatgtttcccagagacggacgtcttcaggcaggtccgccagcggcatttggttgcaagacctcattccccatttctccacgatggtcccaagccttctctcaagcgtctctgctgttgtcctcgccaccgctttggtagcgaaccctgctgctggaatagcagcgctgcccacgccccgttcggaacgcctggcgagtgtgtcgtcggcagcccgtacattagtcccaaggacctccagtggatctgggacaaccgtatgaagtcggacatgactggccacgacaactggattattgatcacatcgtgaagaacaagggctcgctcaactactgcgtccgctgggacagccagaccatcaagctcaccaaagaaaccgcgcagaaaatcgaggcaatgttggcccgccagtacgctgcgtggaaccgctggctcatcggctacaactgctggccgtacgacgagatcaacatcaacatcgtcgactgggctgctaggaaggcctccgacctggagtggtcggataactcgctcggcaagatctacatcggcgacctcgaccaggacggggaccatcaatgcccgagaactgctaccgggcggcggacggttttggtggctggtcggagtccagcggctgcgagggcaaaccgttcgacgtctcgctgtggcccacggaggaaatgaccggaggcttggggaactacaacttccagcagttcggtattgagacgttgctggacggcatcgataacgagcagctcacggtcgccgcgcacgaaatcggccacaggttcggcctgccggacttctacgagatgccccagccgcccaactttaagccctgcctcatgtgggggctgtccacggacacgatgaaggacacggacggctggatggttcgccgcgtgctggagaacaagaaacccaattaccacttctaagtgtgggaagggcgggtttcatgcataatatgcatgaaactggtcaaacaaaaagacgctaagcggagttatcgagataatcgcgtttaaagttgaccaatcaaatttcggacataactggacatcaacaagttgaaagtgaaagccactcgtaaaacgcgtaaaaacactcttattcgattgcttttaacatgagctatccgataatatacaatatgtcgaaatcgaaaaaatattgaggtcatacgccccaaataacaccagggatttcggggtccgaaaatggagatattttttcagaccggtgtcactccacgagttcttcatatttgggagcgtatgatagctcaaaagaagcacaagacagccctcttgcgattgatgtacttaaatcgtgattcgtacttaggttcgtaagcattttttcgtttgacgcggtctcatatagtcttagagttcgtttgttgttcataaagattgatgttctttcatctcgagatcatgggtcgtgatgagcagaccactttaaaagtggcaattgtcaatttctccactttttgctttaaagtggcacattttctcggcaggaagtggaaaaagtggaatccatacaataattattaaccgtctggctaagtacgagcctaaaggtggcagacacatttcaggtcagtagtaagtacttaacccctatctatggataccttttgtgttagactgcgagctcgctgtgcatcggatcgctgcccccgctgccacttccaaacctcgttttacatcgatcaaaatacgtaaatgtataaattgacaacagcggcaaccgcatacctgcatacgcgtggcggcatggtgtcccccttcgtggctgtacggaaaccccgtcttgcttcctagcttcgtttatcgcatagtacacctatgacgcctttgcgtcgatgaatcatactgcttgcgttgatgagctataacgtgcgaacttcgctattgcctcaagtgtatttcgctacgaatagaagcacagtcgtgttcgtcgactccaacagcattttcgcagtttccgccatgtatggcatgcatctgtactgtgtcagcgcccttttgacagctatgtaagtgctattgtgcgtggtatcgttcagaagggacttgaattctggtcattcttaccaaaatttactccttcgccagaaagtggaaaaggtggaaatttttctaattttgccactttaaagtggtctgatgatgagcaagcaacggtattgtgtattatttcatctcgcgtgatttttacacaaatgcttgtggtggatatcactgtccccgagtatgaggaggaacgagctgttggaagctgccagagcgggcgagctccatcgcgccaaggccttggtgcatcaaggcaccggcgtggacaaggacaacgcgcttcgatgggctgcaagagaggggcgtctggaggtagtgcggtatctagtggatcgtggggctgcggtgaattccgtcgactacttaggagagacaacattgatgagagccgctgaaggtggacagctcggtttattactgaggagtgcaagtgtgacgtgaatacttcgagtttgaacggatccacggctctggtgtacgctgctaggagcggacaggtggaagttgtgcggtatcttgctgggtcacctggtattgagctggatgccaaggacacgtacggatacacagcactgatgaaggcctgcaaagctggacatgttgatgttgtccgatgtctcgctgaagctggcgccgatgtgaatgagactgacgcactcggacacacaacgttgatgaccgcgtccggaagtggctacctcgaggttgtgcgatatctcgttgaggaatgcggcatggccgtgaattctaggaacatgcgcggtgacacggcagtccgactggctgttgcgtctaggcatcatggtatcgagcagtatctcacccctctgcttctcacccctcgaatcatcgatacggctggcgatgcagctgagatcgagtcgagctgctttctgacgaatgacggcacggagtcgatagagctggagtctgccccacaagtagttgcagcaatgcaaagactgctaattcggctggagaagtcagagagcaagcaatcgacacgagtgctttcgatgtatacttcactttggaatcgcctcaagcagatacttggacagatcagtggtaatgccagcgatgaatgcgaggcagaatttcgcgcactggtagctgaagctaaaacagccacgttaaagcagcagacgaggtccgacttggacacggaagcaacattgcgggttcggcttttgagctaagggtggacgcatttatggactctactggcgggaagggtacaacagacttggcgtgggcagctaggaatggtcgaattgaagtggctcgagctcttattgaaggcggcacagacgtaaatgctcaaacagaggatggccgaactactctgatgattgccgcggaagatggccagctccaaatggctaaatacctcgttgaacatggtgccagtctgactgccagagacagtgtggggaatacagtgctgatggcagccgccgaaaaggggcgtgtggaaatctgccaatatctcactgagctgcctggctgcgacgtcaatgccgcgaacgcattcgggcatacagctccactgcacacggacatctcaatgttgttcggtacctcgtcgagcaactcagcgctgacgttaatactgagagcaaatccggtcttacagcgctgatgatggccacaatgggcggggcgagcaacattgtgcgatttctggcggatagccacgatgcggacgtcaatgccaagacgaatgatggagatacggtcttgatgctcggcgccggtggaggacatgctgatgcatacatctacttcactgaggagcggagacttattgtaaatgccaagaacggcaacggtgacaccgtactcatgagggctgcagcaaacgggaaagttgcgatcgttcgatacctcacagaacacggcgtggacgtgaacgccacaaacaaaagaggacacacagcgctgatgaaagccgccagaaatggccacgtcgaggtcgtccagtgcctccttgagcaacgcggaattgatgtcgaccacagaaaccagcgcggagaatctgcggttcgattagccgctgatcacggacatcaagaaattcggcggatgctgacaccatttctcccacctcgccctcagcatgccacagcagaagttatgtgttctaatgctttatccagctacatgatccctccttccgaagttggtctggtccacttcttcaagaacggcaacattggaggcgaatactttgccaagtggttggatgccgacgctgtcgtcaggctcatcattccggacgcatctcacactgcatccaaggatgaagttcgcttgtggcagcaactgcggcaccccaacgtgatgaaaatgtatggcgcgtgcgatgttggtccaaacctgcagttcttcgtttgtgagtacgcgagcaatggatcacttattgagcacgtgcagttcgcttcgaccaagagaccagcgatgtggaagttgctgcatgaggctgcactaggtctcgaataccttcacgagcggggaatcgttcacggtgatcttcgctgtggtaacattttgattagtagtgatgggctggcgaagctgtcgaatttcggcttgagtggatcgacgaagagatctcgtgtgggtctttggatgtggtggggtcaaaacgctggcaggctccggaggttttggagggtaagccgccgacagttgcgtccgatgtttattctctgggtctgtgtattgcggaagctgccacgagggagaagccgtggggctgccaaaaggagcacgctgtggacaagtataagatccactggactccagagacggatacccacagcttcagtgaacctgactgcccacctggagacgtgcgcaggctggtatggcggatgtgtagctacgatcctgaccaacgggcaaacctgtcttccgttgtctttgagctcgaacgcttgacttctgctgagagttctttgtcttccgacccggagtgtgagcctgcgatcgctgtggatgacaatgagagcatcgacgttgacgaattgtggctggatgtggaacagttcatgattctgtgcgacgaagaccggtattgccgagcatttgacgacctcaaaagccttcgtaaggctttgaaagattcaagcaggaacccgaagtagttagcacagttcaaggcgcttctcacggacttttgtcggataatcacaatgccacctgatcaattctccctgctgcaagcttcttcaactcgtggaatgatcgcaaacatggacgcgttccattcacgcattgatacagtattgatatccctgaagtcatcgttaaatgaagagagtgagaggaattcacggtggcaacaccagcgcaatgaacagaccgggaggctaacttcggaagtgcaggatacttcgcttctattggaccgccttaagacaccagaagaacgagcggcatacctgaggaccttgaaaacagagatggacaaccctcaatccaagtacacaccagacgaacttaccgtgatgaccgacacatacactgaaattgcatccacaattgagagtgaggatttgtcggagcttatccccggatggttcatccctaggttcgagttgatcgtcgatgagtggcgttgcctgggaagtggcgggtttgggagcgtgttccgagccaagtggcttgactccgaggtggtggcaaagctccttgggtctgaaacaggaaaatcctcccaatcgaactcgtcgttgctgtcggacctttcaagctcccaatctttaatagagtctgctgaccgagaggaagcaatagccacatttcggcatgaagttgagatttggtttggattcaaccatcctcatatcattcggctcttcggcgcctgccacgttagcacgccattcttcgtgtgcgagtacgccaccaacggcaccctcgtcagctacttgaaaaagcacccggatgaattgtggacgaagctgcacgaggccgcgttgggtgttcagtatctccacgctagaggggttgtacacggtgatctgaagggcaacaacatcgtgatcgggagcgatatgaaggcgaaggtgacggattttggcttgagttctattgcgagcaaggaggatatgccacagatttcaggcgcgtggcattgggtggcgccagaatgtctaccggagaccaacgacgcagcacataactcggcaagcaaaaagccgacatttgcgtcagacattttctctcttggcatgtgtattgtggacgcactgcgcgttgtggagaatgtagaagcggtgaagtgcggaaaggtgccgcagccttgtctgccgtggggtaaactcgacaacttcctcgtgcggtaccatgcaacgaagagcaaacttcctgcaacacctgcgagctgcagtgacgacgagtgggaaattgtaaagcagatgtgtgcgttcgatccggagaaacgaatcaagatctcgactgtcgttgacaaattggcgcaaatggccagcgatcaacaggacagccttaaggacaacttggagacggagcaaggagctccgaaggtcgctcgggaagcaatcacagcagcacaaaagctgctgaaccagttggtagacgcagaggaccgatcgaagccgctacctgctttgtatgcttcgctctgggatcgcctggggcatgtacacgacaccatcgacgacaagcacgaaagcgagtgtcaaaccgagttttattcactggttgctgatgctgacggggctacgcagatgctacaagacgtgagcgatagtctcattcgtttagctgagacaacaatgcggtattacgctctgaatcgccgtctggacaagttttgcgatgcttactcccctcagctcatgcagaacacggaaacggcagagccaagtgagagctttttggctcggtggtcgcgcgtgttttggaatccctagtggatcatcgagtggaagatctttcgtgtatgccgtggagctcgctacaatgcaagtccagtttgcatttctacgaatttgatgaatactttatgcggcaaatatttgatcttcatggctaactttgaaaacatttcaacccgaagaaactcttaactgggcactactaggcttgcttttacccattcaggacacagtgatgatcttggagttacttaatattgctcgtacgacgtcgacgcttggttggaggctcgtacgcatcaagtggtagcgagaccaccgccggtcgagcggatttattcttattgggtttcttcgcgccttggacaagatcatcccacttcagcaaagcacgcgtcatgcggtcacgcaagtccccgatctgcagcagcacctcgcgttgaacctgtatcgtcgcagagctggatgaagacgatcctgtgagcctcgagtgctgctcccagtcgtctagcaagggtaggaaacgttttcgcatacgcagtgcgccatccgccagacttcggaagagcgcgtcgttatcagaagattcctcgcacacttgcttggaaacctcgatggtcagctggtacgacgagcttccgagaccgtatgcttgcacaatgtcattgatgtccatgttgttgccgtcatcatcgctgtcagaggcttcgccctgcaaaatactagaagctgcgttgtctttcgtctccacactttcccactctacgtcatcgttctcattctcctcctcagcatcatcagctcccaatcctgccaacgacggctcgttcacgtcttcccattgcacctcatcatcaccatccccttcggctcgaccaccgacaccatttgcggcatcttcagtatctccgttacgcttctcttcacccaaaacaacatcatctgcaggacctggcaatgccgatttctcttcctcttcgtcagacccgtctcgcacatcaaacgcgtccagcgtcggcaccagaatctcaaagacccggttcatctccaccagcacctgctccatctccggcacaaactgcgccatctctttgtctctttgttgcttcttggcttcactcacgcgttcacgatgccgtctcgtgtcgacctctcgctgtcgttgttcctgccgcctctcacgtctgtgtgggaacgcataccctctctgcatcagcacagcatggcctgccaccagcgacgggtatttgtctccaaagtcctgcttccacgtctcaatcagcgccagcacctccgtcacctgcggggacccctgcgttctcgcccgcaacgctcttgaaacattggcactcgggtcttcacccgcagccaccagcagctgatcaaagaacgaggccgtttgattcgtgatcagcgctcgaaacaccacggaccgcttgaaaatctcatcacacagcgccaccgcctgcaaaataaataataaataaattaccgtaagaggaaaaatactttacgtcttcactgaccctggagaagacggtaggcggcctgctgcctcgctgcaattgacacagcactgttaagtggagcttcttaatgcaatgagactgcactggagctgcggaatctcgtagcaggcgcttgagatgcttcaagcaggtttcgggggtatcggagttgtcattttctgcagatggcgccatcattccgcgtcggccacgccctcgaccgcgtttactgctcgtcgacgctgtagacgcgacacggaagtagccggccagggcctcgtcgaagcgagcggcctcgttctcgctgttgagctgctggatgcccgtcggggccgagactccatggcgtcggtccatctgcccgctgtaagaaaacaaaaacgagtgcgaaatgaaaacatattggtaattaattttctgagatatagtggaaatagttttcaaggcgaaaattcggactcatttttctaaagctcgccaatgagtgatggccaggcctccttatggattttcacgggttttcccagatttcccatttttaaatctcaaatactcccgtgaaaaacagaagactgatttgcgggctttgccccgcggtgttcgcagttcggtcttttttttactgtattccaaaacctgcacagtagaaaactttatttactactagtagtatatgtagtaatagcgctatgcttgccgcagaagagagttgcgtgaagacgttcttgaattttagcacttgctcttatttttgtactgtgaaatatcatgcgtccatttgctggatggcttacgctgctcgatctgccgtggcgaatcaacgtgaactcacactattgggctgctaccgcgggagtccccgtatgtggcgctgcagcagtgcgcggcgacgggcgtagtcagccgtcataaccgcaaatttcatttcattgcatgaactcacactagcgttactgctattcatggtacatactgcacagcttcaagctgccagactgagcttcggttcatattgaatgtataatgtgtttattttttctggggttattcggtgtatatgtccaaatttgacgcctgcaacttgattttgtagaattgctatactgatttcaatgccgtttaggtctccccacttcaaagtcgactctcaacaaacagtctgcacccacgaccattaatcaatagcgatatttttgttttactcaacgacggtttatggttgctgctgctgtggcgtccgacatgtacaaacagatatcgtatcttagaaatgacagccacatgccaaaactaacttagccgatacgacggcgacctacctattgctcgcttgctgccccgattcggtcgattcctgatatattgcattgactgactgacacccctctttattattgctgctgcctggttagcttgtcgccgaaagcatgctttgagctgtaataaatcggagtttgcgctgctgtgctgtaatacaattgctgtacaactgtcattgctgttgtttcaaatagctctttaaccgataatgcaacataaaagcatatgttgcattatctcaaacacccgcaggggcacaaacgacagttcttacgaactgcggattttatgctacggaattgtatatgattagcttttggtgtcgcagcgcaacgaagagaacgctatctaaatgctgaaagcgctcgaataatggtccaacacagctgtgggacgataggaccgtctactgggttcatttaccttattttgtgtcaggtatctttgtaagcttgagctgccaggacagggtggggaaatcaagggtgggggtggacttttgaggttgcaaattcactaatagaatgcttgctacggcccattgttgcttggatcaggatacctttgctacgggttattattgttagatcacggcaatctttgcgtattaggtctcttttttagtagatgtaggaaaacatattcaatcagcggaactgtcaacgataattaaacgtgggcgcttttcaatattgaggttgttccgcatagacaacgatcatcacgacagcactgactgtgatgtatcttaatgttactacttggggttcttatgatgacatctaatggctctgaagcaccagtatcaacatcggaataagtgggtgaatcatttgacttaagtaaagtatgcgtcccataactcccatattcaaatccagaattctcccttgataagcgactttacgggaaaactgggaactcccatctttaaggagggctggtgatggcacacgattgagccattgtattgacgacttttatatttattttatttttcgtcggaattaatatttaaaacgctgatttttttttctttttcgctgaactgacagaggccgaccacacgattcgacggagttttgcagcaacgtgactatacagaagaagtgtgttttattgtacttctacttctttcacgtatcgatagtgataagtgttgtctttctttcttgttttagtaggattattcttcatgggtgcagcgtggcgctccctcgcaccatgcagatgtactccacaaaacttaactcgccagaacctgccgaagatgctgacactaaattgcgccttgctcaaggaaaggaagttgatcgctgccgtcgttaacgacagcctccccgtcgctctgctgcaggacgagatcaagtcgaagtttcccaacaccgtgtgggctgcgtgtgatctgcagctcttcttggcgaagaagtccgacggcacgtggctggacgctcatagtgacttcgcttctgtggagctcgatggcgacggttgcccgcaagggctcgtggagatgcagccactgctgtggcccaagaaccccaggtacttcggagccaactttaagccagcggtgggtcagctgcacgtgctggtggtgactccgaaaccacaaaagcaattgtggctcgtcacggggtcggtcgaagatgcgcttgggccgaaccgaattcgttggacactgtacatgatcgctcagcagtatgttggtttctacgatcctgctcgccgcagttgtgatgggaaagaaagtgcgttctggtatgaagaagacaagctctgtattcacgttttattcaagactggtaaggcaatttggtgatgtaatttgtaggtggatgcgtgacctaaccatgttatgtttgcagaattgaatgcattggagttcgagaatgctgctcgtgaggggcagatggtgcttggctctccactaacgggccacgaggtgtggacaaccgtggacgaggtgctcactactgagccacaagcgcttcggcgcatcttttgcgaccaatacaaacctgacgaggcgatgtctccgcaataattgagggctctgccaggcgatctggatgcgggctttgagctcatggatacttcgacggatgagtttcagtatcaaaatggggcttactcactttgtccagttgcagctagtgttgaatgagggtaacctgcggtatttgctgggcacgataatcgatggcttcgccagacgatctgaatttcggtttttgaactcttggatactttatttcactatcaacgagtagaacaggaacggtaattcatcccgtgagggctgcaatgtggcgaaacccccgcctaccggtgatgcgaagttctcatcgttctcattgagaacgatctgaacgatctgctggcactttcattcgaaatgcgcggatatttgacggcaaggagaattttgttttgctacttcagagcatttgtagcgatgcgagtcccaaagcggtagccggtgcaatcggccccaaaagcaataacaagatcctccaagatccaattaaggatgccaacagtgatgtttcaccttgctcgacgaagctctcacctggggtgcagcatcgacactagcgatacacaggggaccatcaagacgcaccaggttcgaattgactactcaagtaccctgcaagttccatgctgacaggctctctacctcgatgcgtaaaaaaataagtttttatgaatgcaatggatccttctgttccgcttgcctgcttttcctacttccctgatcttttgtctgaaggacacaaaatctgaatggcaaagatccgtgtcgataccgaactggccaacgcatatgtcaaggctttttctctacaaattctgcagccgctatctcgacctcatcaagcccaaccaaacgcgcctgggctccttctgtggcaggtagttcaagcgaaaggttaagcagcaaccgtgggaatttgccggtgtccgacatagctccagcaagcacgggaacagaactgttggactcgataacggacttgccacgcttggtagtgacgacaaccgcaatactgagagccaatagcgcagagcagccaacgaccgatatgatgcagttaatgaatggaatagatacttgcgttacgaagacgttgatgttaccgataaaatcggggacccatcggccatcattggaggaaatcgtgtgcaacacggccgctttgaagaggaagtggaaccccgcggtgtagctcatttgtagactttcctcggcgaacaaatggtttgccacagtgttgttgatgtacgaatcggcttgaaaggagcacgacaatgggtcgacggtggtaaggtagtctccggcttcctgcgcaacgaaatcaaagtttcggggcaaaagtgttcatgagtcttcgggagcgccgccaatagatgcacatggacgaggagaacgtgtggacacatccgccgatgactcggaggatccgacggcaacaggagagccggcggcagccgggctctgggtacaccaatgactacccatatatactgagatcaagtcaagcggaaaccgggagtaatccgtctgatgagaggcaccaacgagcacaaggagaacaagaaggaaagcaggaggggaagactagagagtagtttgagagacgataacatttaatctcacttcggaatttgccccctcaaccacaagctacaaaccaacaaaaagtatgggtagagccttgtcgacttgaacgagcttctaccagaccatattaccatacgaaaaaagaaccaagttgccgggaaacatcactcctaaatcaatgctgccgtgtagggaatcggttatgctgctttcactagcgaggagtatcttgctctgctgctttagcgaatcggtgctgagccgaacgccatagcagttcgaaaattcgtcggcgcagccggcttcgaaggcagcagctaaatcctccgaggtccagttaaaaacaccaatcgtgagtgagtacgttgtacgaagttccgatgcgacgatgttcggctcatcaccgaccaccgttaagttgaagtgtttatcactgattcgtttgccgagagatgaaaggaacagtgcgcaccctgattcaaaatccatagcttcgctgcagaatggtgttgcctttacggccggcttaatagtgtgtgtcgaagcgccaaacaacgaatcattgagtaacaaacacccatctggggtgcgctgcgccgaaatgggaatggtttgctctccatctgctgcattcactgctcgggtcggaatgtcaaggtaaacgacgtgtaggtgagagagtctgcaagttcgtggatgtggtaggctgcaccaacttcacccacgacgatgttcgccgcttttcccaggagatcgtgcagcatcatggatgcggctggaatgaacttatcgccagcaaatgccatcagttccccaacagtcaggtcctcgtcatattcagattcataggtcgcgttccagcagccgctcgactgtcttttacaaagcggtagaaatcgccatcatctccatgactgacagttaaaccccaaagatctccaagattatcaaacaactccatcagagccgtgatatacatcaactgagccgtctcaagttgagcagaaaaagcaaaatccatatcacttacgtcaccgcgaacaggaagctcgaatgtctcctttggttcgatagccgtcggcagggcgtccagcagccaagtgctctcaggatagccaaacacgacctgtgggggctcgaccagcgctccgactattggaagcagactctcagcatggttctcgcacgtgaatctaacgtttttgaccggggtgtatcgagtgcgcaagatggtgttcagtgccgaattgttgagggctctctcgatcagcgatgggttccacgcagagctgtcgtatgttggaacggtcacagccaagtcttccgccacaatccacaaatgggtccgtcccggaactagctggacattcaccgaggtcggcctgttgcatatcaagacccctagagcagcctccgcaagtgttggggccacccccagccagaaacccgtctcgcttttagtaaaccatttggcacccagacacaatagaaccacggcgaccagcggttcgacagcaacctcgatggctttgttgacggccgacatgaagttgctcatcctcgaattgtacttgtccagcagctctttacgctccacgtcgttgatttcgccgacctcgacggaaaagaaactagctccattgcccgaaaagaacgcgagaaccaaccctgtcactccaacgatgaatagagccacggcgaggatcttaacgacggagaagtcgatccgcaactggttgccactgccattgttcggtccagcgttcacagcctgatccaacttgattttctcctcggaggctgacgcctagggtagtacggggtgaatccatgacggcttcccttccgatgacatggaacagccaaacgcgagctttcaccgacctagacgcgagatgccgacgaacttgacgagggcgtgaaaactagttgcaggttggtcgcaaaagcagaagtgaggacagttataagagagaccaacgaagcaggtcgtcgataccaagtaaaaacgtgagagcagccgggcaaggccagatagtcgccataagcgcattgtccttttcctcgttagaacgtgacttgactttttgagacgggcaacggctttggggggagccaacagggtacccttggctcgaaacgacaatttccggacgcgcgaaaccagaatagcacgattgagtcaataggggggggggggtcagaattagctttttcgccgacatttttcggccgaaatggtcaccataaaaaatatggtcagccgacatatccatttcgcgaaatggttcacctgtttggccgaaccatttctgaaatggtcagacatttcccgaaatggttgaccattttttggcttctggtgaccttcactctgtttatcttgctaaatgtatttacgtcgatttacacaaatgtcgagcacgtgcgttgcgatgcaccagcgcgcggagcgagccggcggcggcagcggcgacgctcttctggacgctcctgcgccgtgcacatcgcggcctggagctagcgcaagctcacgcgcgtgttgtgtggtgctgcatggcgccatggcctgctaccacgcagcgccacaacgggccccgcggtctgctgcccatgcgtggcagacagctaacgggcagctaacgctcctacattcctacgtgcgtcctctacgcagcgctgctgtcgcagaggcgcccatcggctccagcttgctgcccgagccacagggcacgcgcagcaagctgcagccttgcatagataagctattccggtcatttcatatgagacagcctcaaacaaaaatatactttttggatggtgcacttgttggtccgtacggcctggagccaccactagtaggaaaaaggaaaaagattgaatggctgagcctcccagctcttaccactactctcgggcttgagcccgtttctcatgcaacgacccgcagctctcagctctgctaattttctcaggtacctagcctcagctttcgcccgggtctcaactctgaccttcaacttggtcttcaatgtgcattccaacacgcctccctcgaagcatgagcttcgactaatccgcatcaccaatgccggccagccccagcatgttctgcacacgcagcttgtcgagcggcttcgtgaaagtgtcagcggggttcacctcgcctcttatcttgtgcagttcaatcacgcctcgttcagcttgctcacgcacaaagtgccagcgcaactcaatgtgtcgggtgcgaccgctgtaggtaggattcgtagccatgatgtgcgcggcttggttgtcgataccaatgcgcagcttcagacacttgtgtggcagtatttcctgcagaatgttgctttctgcaactgcctccattgtcgcttcacaggcggccacgtactctgcctcagccgtagatagagcgacgatggattggcgtctcgacatccaggataccgccccaccagccagcgtgaacacgaaacctgtcgtgcttttgcgggtctccgggtcgttggcccagtcactgtcgcagtagccctcaagcaccacagtcttcgactcgctcgactgtcggtcatacgtaattccatccccaacatgcttgctggatggctttgctacaaagcgactcagctggctcagtgcgaacgccaaatcaggtcgggtactagtggccagatacattaacccacccactgcctctcgatatggaaaactggtgtcgctttcttcatcatcaccaagcggcacgaggcgagcattcacctccatcgggttcccaaccgagtgtgcctcagcgtagccaaacttctccaaaatttctcgagcgtacttgctctggcggatgtgaagcggtcagcgttttgctccacttccacccatagatactgcgtcaaaagtctctagtccttgagtccgcactccttgtccaggtcttcgaacaacttctccttctgcttttcatcctgggtcgccacccagatgtcatccacatagaccaaaaccagcatgatctcctcaccttcaacatgataatataggcagggttcagtcaaagaccgttgatagccacgatccagcatccaccggttcaactcggtgttccattcacgtccagactgtcttaacccatacaatgccttcactaccacgtagatgtgcccatccatttcacaggggaacccctcaatcgacctcacatactgtcgtattcctagcttcgcgttcaggtatgctgtattgatgtctccgccatagagcgtcagattcagtgctcctgctagtccaaccatcaaacgaaacgaagacatacgagccacaggcgagaacgtatcaccgaaatcgattccagggcgctggcagttgccaagtgcaaccagcctcgccttaaagcgaattacgtagccttgcgttgtgtgtctggtagcgcagaactctcaccaatgccctcgctacggcctggacatcgacaagtccgtgggactattccccagtctctcagtcagcgaagctctcgacagcgttgcagaatccacgctagcgatgcaaatggggccactcaagacgcgacaggatcggattgacttccgcgcagcttccatgcccgacatgcgcttctcgtcctcgctagtgcgtctgtccgacaactcgctgcggctgattcgggcgcgaaggtactcggaggttggtgatatccgcgttcttcaagcaactccaagaggatagccattcaatgtgtgtgtgcaagtgtgttcaaccgcaggcattgtcttgcaaccgggggtacttatgaatgcgaatgtcattgttttgcttatttttttcctggtaatgtagagtattcattgaaagtcaaccgagaggtggtgtggtcaccagtatgcaaaggaaagtaaaatgaattctgatgttagctccaactctaaactagtgcttgtccctgctcctggtttttgcctacgaattcgtacagcttctcgaatccggcttctagaactctaagcaccagagcgagaattgcttcggatcgtacaacatgcactgcggcagacacgagactggccagggctggccacactggtctaccgctcttgaaatatgcaatgccacttggccatggtgtatcgagtgcgtttaagtttcatccagctgtgccttgaactcctcgttctgttgctgttctgcgtagttggccaccagcactggcacgtcgcgcagcatggtctgcagtggctcccatgattcctcgatgtcatgcaggcgtcgccacgatactagtacttcccattgttgcgttgccgagttgtagcggtggtcgcgaaaacactccactcctagcacgatgccttgcttggcaacgtgctcgaggatctcttcatcgacgttcatacttgcgtcgtcgtagtacttgagcctggaaccatgaacgtcaaaggtgtcaccagtaaggagatgctccaccatgaacgagtattcgcgagcttctgtcacgcagtaagggcccacccagcgtaccatcaatttggtgccgcgtagacgctcgtcgacacgagaccaaagtacatagtctccaacgctgaagttctcgagtttcccctccttagccattttctgatacatacgggtcttctcctttcgatccacaacctcttgatgcatcgagtgtaggctctcacgcagcacctctagctcctcctccactgtgtccatgttaatcttcatcaacttggccttggtctgcaacgtgcgggggagcagcaccgtgtccagctgcgtcgacacttggaggcctgtgaagagctctaggggtgcattgccaccaagcgagttcacgggcgtttggttcagattggcctgcacgagaggcaccaaatgctcccagctcttggtgtcgagctggtattccaacagcagcgctctcaccacctggagcacgtctcggttgaggcgctcgacagtgccgttcacccacggagtgtagacgggcacgaatgtgtgcagcgcccttaatcgttcccgcagattctccatcaactcgttcttgaaatgggtgccattgtccgaaacccacattgccggcagtccgaatcgttgagcccaatccagtatagccgccacggtcaccgtgcttgtaggtgaatcactcggcactaactcacagtagtgcgtcagttcatccttcagtaccagcaaatagcgcgtgcttccgtacgagtctcccataaacagaaaatcgaagtgcagtacctcgttgcgtccggcaggctcggggtgatcgctccatggacgctggataagctggctgcctctgatgtgcttacagagcaagcagtctgcgacgaattccctgaccacctttcccatggacttaatccagtactgcgcctgcatctggcgcagcatgacgtcggctccccggtgagtgttcaaaccgcagtgagccacgatgagactgcgcgtgatcagatccttggccggcgccgggatccacaccttcccctccacctgaaggagctcagagtccggtgcgaccgacgcagtcgccgtcgacggcgctgagcggcggtggcgttgctgcgcccctatgacttgatcaacagatggccacacgaaagcttcgtcactaagcggacgaaggcgcgagagctcacggaacgaccgagtccgcacagccttgacagacacttgagaggtgtcggcgggagccaaccagcgcgacactaaatccgcccaatcgttcttagagcccttgacatgttcgatttcatagcggtagtccgacagcatcagggcccaccgctgcaactttccgcgcacatgcttgcgaacctccgtgtgggggcagaagatctgaatgagattcgcgtggtcgcaaaataatttgaaccctgcttcgcggtgcagcagatactccaggtccttcgcagccttgataatgggatagccttccttctctgcaatcgaccagtgtagcttagcacccttaaacataccgcccttgcagattaaaagctcgtgcgactggtcggtcaagatcttatggtcatcccagcactccacttgcgagacaatgagtggccatcctcggtccgaggcatccgtagtcacgcacacagtagccgcctcgctagggaacgccagcttcgttgatcgagccacagagtcaaggaactcgcgatagtggtgcttctcctcagccgtccacgtgagcgcaagtccttcagcataacgctgcttccgactgtgttcttcaaatgcactctccagtttggcttgaagtggggccgcatgctgggcaaagttcacgatagattcacgcaaccaattagctgcgcaaagcagcttctgcaaatctgccgctgtggctggaagcggcagtgaacacagagctgcaactcgttcgggatcgtggcgaacgccctcaccgtcaatgaggcgtccgcaccaggagatctcacgcgcgaagagacagctcttgttggcattgagcttcagaccatactcgcggaggcgagcgaagaatttcttgagcaccgcgatgaactcctccgcagtcttagcgaacacgacgatatcgtccacccagatcagtacgttttcatacaccatatcgcgaaacacctcctgcatttggttttggaaatggatcggcgagtcggttgctccttgtggcatgtgtacacagtgtcattcgtgatgaagctgaaatattcacggcagtccgggtgcagcaaaagctgccagaaccccttgaagagatcgaacgttgcgaagaagcaaacccttaaccttggcaatcaccaccagtaggtttggcattgcacctgcgataggcacggtgcgcttgttgatcgggcggcagtcgggggcgcaccgaaagtcttcgacgggacccttcttgcgaacgggaatggccgcacaagcccacctactctgattgttacgtacaaccagctcaaattcttccagctgcctgccgtagtcccgaaggaacttgggtttcagctcagagtactggcgaggcttcgttcgatacggtgtggagccgtcgaccaatacgactcgcagtggctcgagcttggcgggtgggtccgcgcctagcttcgtccgccatagatcaacttcttccttggtggcatctcgcagcgcatccttaaattcgtgtggaaacctggccttgacagcgtcgtccaacattacgtcgagtcggtccatgatttcatccaggttggtcgcgcccacgatgtcatcctccggtataccatcctcgtcctcctcggggccacctttggctgcgaggcgctccaggagatgatccacgttgatcccaagcgacttcagagttcgatcaccaagtaagaactcatccgcatctccatcgatcactacacactgtagtctgcgcagattgaccggactggcagccgttaatagctgcacgtcaacttcacacatctcggtgcaaggaacgagccgtccgtctgccactttaaccttcatcggcacatccagctcttccaccacgaggtcatcatccagtttcctcagttcatgcgtaatgtggcgggtaatcacgtcgtagtcagcgccagtgtcggctcggaaaggcacctccaatatgccattcaaaatggctgcacgctcgccgggctgccctattgatcgcacagtcttcacacgcaagcgctggttcttcatgtcattcattcgttttagggctgcttctttgtctgcctcactagcggtggggcaatccttcacccaatgtgctccattgcacacgagacagccatcgcgcggaggtgcgcggggcttgtcggcttcttgtttcgactgcttgggcttgcttgatgacgagtgttggggctgtgaaacacgaggcttcaacgaaagtgctggcttcttgttggagtgattggtcttggggttgctacgaggtttatccacctgcttgagctcctgggccagcatgtggtagtgctgctgctctcgtgcgcgctcgactaaggcctcgtagagcgcaatattgtccttctggagtaccggcttggcgatgaccaggcgctccatctccagcctcaacatctctggcgcagtgttccttagcaggtacttgcaacgcaacttcatgcgttcgtcgtaattcggttcattttcgcgtccactaccgaggattccacccaaaccatggtcctccacaatcttgtcaaacagcacgacgtaattcaccacacgagcttcggtgtcttcgatcttaaggtccatcttcagttcttccttgaaaagctggtccatgtccgggatgcggctattttgcagcgctgagcaacgccgcgtgatctccaggccgagatcttcatcggtcacgtcagccgctcgcttcttcagcacgaagcgagcctggtggtccaggatgcgcggctcgatcgagttgcggatcgaggtgacaacgtgctcgtactgctcgccagtaaccgcgcagcgattgcgaatcttggcttcgtactggcggcgctaggagattaggggcgcctggtcccaggcactcaggctcggaggctgaaccacctcgaacactggctgcggcacggtcatctcaacgtctccgtctgcgtccgtggccatcttgcttgtctaggctttacgccgtgcaggtcgacttgatgctgtagcggtcggcccgcttcttcctcttgccgcggcttctggttcgtccagaaagtatactttgtggtcaccagtatgcaaaggaaagtaaaatgaattctgatgttagctccaactctaaactagtgcttgtccctgctcctggcttttgcctacgaattcgtacagcttctcgaatccggcttctagaactctaagcaccagagcgagaattgcttcggatcgtacaacatgcactgcggctggccacaggtggggaagtgagcgtgggagcttgtcggtattcgccatggcctcagccaggacggggactgagctgttgccttcaataatggacttaccgtgggtgtgcgtcgcggcaaccgaaaggctaagcgcagaagcacgcagcagccaacgatctacaggatacagttggtaggtgaaatagacactttgagcgtaaagtggtggctgtttcccgccaagttatcatcaatggcatgcaggacgccattcttaaacgcgaaatagagtcccgcggtgtagctcatttgtagactctgttctgcaaacaaatgattccccacggtgttcttgagaaacctgtcggcttggtttgagctcgaatccctcatggccccgtggagataatctcttgctgcctcgctgcctcgtcaacgtgagcaaagttacgaggaagcagcgttggtagaactctgtcgacttgcaccagcttttgccagaccagcaaatcgcaagggatcattttcacatctgcagctagaaccgctgcaacatcaaagacgtcgtccatggtatcggtgctgtcaccctccaggagtaccttacttttctgctgtaagcactatgtgttgagcgtgactccggaacaatgagtcattttgtcggcaccttcagcatctaggatggccgcgtcgactgggagggttggaattgtaagcggtagtgacgtatacgtgacaaactctggaagttgatgtttctggtaggcagcgctgacttcttccgtagcaacattcgcagcgctatttagcagattttggaacctcgcacttgccgctggtaccaagttacaacagcaaacgccatcaggtcacggaaagattctcggtgtcggcaacctgaacattgnnnnnnnnnnnnnnnnnnnnnnnnnnnnnnnnnnnnnnnnnnnnnnnnnnnnnnnnnnnnnnnnnnnnnnnnnnnnnnnnnnnnnnnnnnnnnnnnnnnnttataaaatttgatcagagtcatgccattgtaagattggaagcaaaatcaaaattgagtttacagctacccgtcatgtctaacgggaagctcaagcctatagccgaaggatatccttcggctcaaacgttataaccagggcgtggagctgccaagttttgtctgggtagcgaaacatgaccatgcgggggctcgatttgcagtccgaaccgttcaaaacgtgagagcgtcaagcctttggccggttgatggcgagctcacagtatggtgttcgttgccgagttgttgtgagccctcttgtctagcgacggttgtcgtcaggtggcgtgacgtacaccgcattgctgccttcaatgatagcgctgagtttaatcatcagaaatatttactccacacatggaagttagagcacgagtcatccacccacgcaatgaagaccgtcgagtgatttaacgtactacgaggcggcgcgctgcaaataaacgttttttaaaggtgcagtattttccacatgcaggtagcgctcggcccaccaaaatgtacattgttgcgctcgtagatgcctttgtgtaacaattttttgatatcatctctttttggctgccttagttaatatgttgttctggtttatattgtacacttcacggattataaaaaaactcgaaccacataccatacgatctttcgtaagaaggtagtatggtattttgttttttcggccgggggccaccgaagaattgttactacgtataactgttatacgtagtaacaagtcttttttgaaagcatccaacatgcaaagttttcttaagcatgtttaaaaacgacctagtagtgcgtgagcgagaaatgcatggatcttactattcaacgtaaatctggtgtagtgaattcgagggtttcaccttgatatgaccgcagttaaggtgtcgcgacggtgacccacacgaaccacaggtaatgggttgtccacatcacgacgagtcaaacttcacacagagtatgtgcggttctaaagactaaatgatcaactgcttcgtgtccgatggccgttggacacggacccacacttcactttgactcctacgtttgcctcaaaaggcgtacacactagatcaatacattaagctcaagctcctatcggatcgccatccgcactgccgtcccctgatgggatgttatccccgggattcactacatctgaacaacattattgctctgacttgcgtacatatcggttattaaaggtgttgattgcgaattatggcttttgctacaccttttcgctgcgtgtgtagatctaactatcatttcagtgacttactttgtggtgtgcaacccttttttcgtattaattgccaataattggtacaatactgtattgtattggaatcgttgatcttcaattataaaatttaatattacaaaaacaattgtttattggatcgcaattattatttcggacctctgtcataaagcacctccagttgatgttctttctttttcaagaccagcatcgctgtctacagcagaatttccgttgattacagctcgtcaaagaatttacgagacgaaagaggactataactacaatattgcgtatcctttcgtcggccgtgcagtatattagtggccaacttgtccacttcaagtgagacttggaccacggacaagataacaagtcgactctattagaccaagcacacaagacaaccttaacttgctcggctttgtttatcaaccctcgatcaacatagcggagcaacctaaggttgttttctctggtgtaaaagaatgtgtatggtgaatggaagagtcttgattcaagacatcacatataattcgagattgtaggaccctggctcctgctgactctcaagcgccgatgtttgaaccgcttagcggacaatacgaacccactggcatgtgccacgtgcttgttttacatgaagtttcatggccaagttctgagtgctggaaattggtattggccactgattcacaagcgtcggttttccttgtgtatgttcaatgttttacggcatacagtacggcactacgcagtgcaataaattagcaacaatataacttacggcagcctgtttttattgtttctccatgagctggtacgagaacttgacaacgatccaatacagcacgagtgggggttggtataccggggcgagctgctctactacaactccagaagtcaaacatttagcagcataagtttctgtcaaaaaacagtagcatcgctacggtccatttaaacacacaatttgagaacgctctagctattacgacgggggcgaaaagaagcaagcgttcgtcttgctaaatttccgtttgggtgtagttgcgaccattgacaaaggggcttgaagtcaggacctcagtgtagtacagtttacggctggctgacgacagggctcggagtgggggtctgtgggatcttggtgtagtacagcttgcggtcgttggcagcagggcttggtgtggggggttgtgggatcttgctgtagtagagtttgcggatgttaggcgtgttctcgtgggtgtcagcttcagccaagacattagccggggcgcggcacagcgtggtggcgatggcggcaataacgagggtcttgacgaactgcatagctggagctggtaggacttgatgcgcgctaggtaaattcaagaatgaccgagtgcgagcgccatgtccaatggagccagcctagtgcagccgttctgctggaagctacttggacgcacgcaacagaagagaacttatcttcttagatgaggttgagtataccgttcgtatactaatatcattaaatgatcaaattgtgatagactcatgcgttttggctaaacggagcccagagactatatagatatcacacttttactgttgatttcgggttatagagtattttgccatccttgttggttaaatggagttcgaaaactacttcaagcatcactagttattgagatatggttacgggatacggggctggaggtgatacggcaagctgatgactcccatgactacaatacgaaacattttgtcgtcaactcgcgtgtatcgtcatcgccgacaactttgttcagatggtacagtagaacgacaattttcacgtgatattccgaatataacgtgttctagcttacccgggcgacaagcgtcccaggggaaggtcgcagttcataaggctgaaaatcttgatcaagatcgggtgatatgtaagagcattaaacgcgtgtcgtgtgtgcagtttgttaggtcttagtacactttaagaatttttttttatagtttttatcatcctccgcaaattgcaaggaggtatagtactcggtaggccgtggcggtggcttcgccggctcgtcggggcccgaatatgacacgatgcacttatccgtggccttgcacacctatggagctattgcacacagcctagcagtgcgtagcggcgtattcgcgatgttcaggcggcatgccgactgtacgccccgtatagcgatcggtaggccgtggcggtggcttcgccggctcgtcggggcccgaatatgacacgatgcacttatccgtggccttgcgcacctatggagctattgcacacagcctgcggtgtattcgcgatgttcaggcggcatgccgactgtacgccccgtatagcgatcggtaggccgtggcggtggcttcgccggctcgtcggggcccgaatatgacacgatgcacttatccgtggccttgcgcacctatggagctattgcacacagcctagcagtgcgtagcggcgtattcgcgatgttcaggcggcatgccgactgtacgccccgtatagcgatcggtaggccgtggcggtggcttcgccggctcgtcggggcccgaatatgacacgatgcacttatccgtggccttgcgcacctatggagctattgcacacagcctagcagtgcgtagcggcgtattcgcgatgttcaggcggcatgccgactgtacgccccgtatagcgatcggtaggccgtggcggtggcttcgccggctcgtcggggcccgaatatgacacgatgcacttatccgtggccttgcgcacctatggagctattgcacacagcctagcagtgcgtagcggcgtattcgcgatgttcaggcggcatgccgactgtacgccccgtatagcgatcggtaggccgtggcggtggcttcgccggctcgtcggggcccgaatatgacacgatgcacttatccgtggccttgcgcacctatggagctattgcacacagcctagcagtgcgtagcggcgtattcgcgatgttcaggcggcatgccgactgtacgccccgtatagcgatcggtaggccgtggcggtggcttcgccggctcgtcggggcccgaatatggcacgatacacctaaccgtggccttgcgcacgtatggagctattgcacacagcctagcagtgcgtagcggcgtattcgcgatgttcaggcggcatgccgactgtacgccccgtatagcgatcggtaggccgtggcggtggcttcgccggctcgtcggggcccgaatatgacacgatgcactttatccgtggccttgcgcacctatggagctattgcacacagcctgcggtgtattcgcgatgttcaggcggcatgccgactgtacgccccgtatagcgatnnnnnnnnnnnnnnnnnnnnnnnnnnnnnnnnnnnnnnnnnnnnnnnnnnnnnnnnnnnnnnnnnnnnnnnnnnnnnnnnnnnnnnnnnnnnnnnnnnnnnnnnnnnnnnnnnnnnnnnnnnnnnnnnnnnnnnnnnnnnnnnnnnnnnnnnnnnnnnnnnnnnnnnnnnnnnnnnnnnnnnnnnnnnnnnnnnnnnnnnnnnnnnnnnnnnnnnnnnnnnnnnnnnnnnnnnnnnnnnnnnnnnnnnnnnnnnnnnnnnnnnnnnnnnnnnnnnnnnnnnnnnnnnnnnnnnnnnnnnnnnnnnnnnnnnnnnnnnnnnnnnnnnnnnnnnnnnnnnnnnnnnnnnnnnnnnnnnnnnnnnnnnnnnnnnnnnnnnnnnnnnnnnnnnnnnnnnnnnnnnnnnnnnnnnnnnnnnnnnnnnnnnnnnnnnnnnnnnnnnnnnnnnnnnnnnnnnnnnnnnnnnnnnnnnnnnnnnnnnnnnnnnnnnnnnnnnnnnnnnnnnnnnnnnnnnnnnnnnnnnnnnnnnnnnnnnnnnnnnnnnnnnnnnnnnnnnnnnnnnnnnnnnnnnnnnnnnnnnnnnnnnnnnnnnnnnnnnnnnnnnnnnnnnnnnnnnnnnnnnngatcccccccgtatagcgatcggtaggccgtggcggtggcttcgccggctcgttggcgcccgaatatggcacgatgcacttatccgtggccttgcgcacctatggagctattgcacacagcctagcagtgcgtagcggcgtattcgcgatgttcaggcggcatgccgactgtacgccccgtatagcgatcggtaggccgtggcggtggcttcgccggctcgtcggggcccgaatatgacacgatgcacttatccgtggccttgcgcacctatggagctattgcacacagcctagcagtgcgtagcggcgtattcgcgatgttcaggcggcatgccgactgtacgccccgtatagcgatcggtaggccgtggcggtggcttcgccggctcgtcggggcccgaatatgacacgatgcacttatccgtggccttgcgcacctatggagctattgcacacagcctagcagtgcgtagcggcgtattcgcgatgttcaggcggcatgccgactgtacgccccgtatagcgatcggtaggccgtggcggtggcttcgccggctcgtcggggcccgaatatgacacgatgcacttatccgtggccttgcgcacctatggagctattgcacacagcctagcagtgcgtagcggcgtattcgcgatgttcaggcggcatgccgactgtacgccccgtatagcgatcggtaggccgtggcggtggcttcgccggctcgtcggggcccgaatatgacacgatgcacttatccgtggccttgcgcacctatggagctattgcacacagcctagcagtgcgtagcggcgtattcgcgatgttcaggcggcatgccgactgtacgccccgtatagcgatcggtaggccgtggcggtggcttcgccggctcgtcggggcccgaatatgacacgatgcacttatccgtggccttgcgcacctatggagctattgcacacagcctagcagtgcgtagtggtgtattcgcgatgttcaggcggcatgccgactgtacgccccgtatagcgatcggtaggccgtggcggtggcttcgctggctcgtcggggcccgaatatgacacgatgcacttatccgtggccttgcgcacctatggagctattgcacacagcctagcagtgcgtagcggcgtattcgcgatgttcaggcggcatgccgactgtacgccccgtatagcgatcggtaggccgtggcggtggcttcgccggctcgtcggggcccgaatatgacacgatgcacttatccgtggccttgcgcacctatggagctattgcacacagcctagcagtgcgtagcggcgtattcgcgatgttcaggcggcatgccgactgtacgccccgtatagcgatcggtaggccgtggcggtggcttcgccggctcgtcggggcccgaatatgacacgatgcacttatccgtggccttgcgcacctatggagctattgcacacagcctagcagtgcgtagcggtgtattcgcgatgttcaggcggcatgccgactgtacgccccgtatagcgatcggtaggccgtggcggtggcttcgccggctcgtcggggcccgaatatgacacgatgcacttatccgtggccttgcgcacctatggagctattgcacacagcctagcagtgcgtagcggcgtattcgcgatgttcaggcggcatgccgactgtacgccccgtatagcgatcggtaggccgtggcggtggcttcgccggctcgtcggggcccgaatatgacacgatgcacttatccgtggccttgcgcacctatggagctattgcacacagcctagcagtgcgtagcggcgtattcgcgatgttcaggcggcatgccgactgtacgccccgtatagcgatcggtaggccgtggcggtggcttcgccggctcgtcggggcccgaatatgacacgatgcacttatccgtggccttgcgcacctatggagctattgcacacagcctagcagtgcgtagcggcgtattcgcgatgttcaggcggcatgccgactgtacgccccgtatagcgatcggtaggccgtggcggtggcttcgccggctcgtcggggcccgaatatgacacgatgcacttatccgtggccttgcgcacctatggagctattgcacacagcctagcagtgcgtagcggcgtattcgcgatgttcaggcggcatgccgactgtacgccccgtatagcgatcggtaggccgtggcggtggcttcgccggctcgtcggggcccgaatatgacacgatgcacttatccgtggccttgcgcacctatggagctattgcacacagcctagcagtgcgtagcggcgtattcgcgatgttcaggcggcatgccgactgtacgccccgtatagcgatcggtaggccgtggcggtggcttcgccggctcgttggcgcccgaatatggcacgatgcacttatccgtggccttgcgcacgtatggagctattgcacacagcctagcagtgcgtagcggcgtattcgcgatgttcaggcggcatgccgactgtacgccccgtatagcgatcggtaggccgtggcggtggcttcgccggctcgtcggggcccgaatatgacacgatgcacttatccgtggccttgcgcacctatggagctattgcacacagcctagcagtgcgtagcggcgtattcgcgatgttcaggcggcatgccgactgtacgccccgtatagcgatcggtaggccgtggcggtggcttcgccggctcgttggcgcccgaatatggcacgatacacctaaccatggccttgcgcacgtatggagctattgcacacagcctagcagtgcgtagtggtgtattcgcgatgttcaggcggcatgccgactgtacgccccgtatagcgatcggtaggccgtggcggtggcttcgccggctcgtcggggcccgaatatgacacgatgcacttatccgtggccttgcgcacctatggagctattgcacacagcctagcagtgcgtagtggtgtattcgcgatgttcaggcggcatgccgactgtacgccccgtatagcgatcggtaggccgtggcggtggcttcgctggctcgtcggggcccgaatatgacacgatgcacttatccgtggccttgcgcacctatggagctattgcacacagcctagcagtgcgtagcggcgtattcgcgatgttcaggcggcatgccgactgtacgccccgtatagcgatcggtaggccgtggcggtggcttcgccggctcgtcggggcccgaatatgacacgatgcacttatccgtggccttgcgcacctatggagctattgcacacagcctagcagtgcgtagcggcgtattcgcgatgttcaggcggcatgccgactgtacgccccgtatagcgatcggtaggccgtggcggtggcttcgccggctcgtcggggcccgaatatgacacgatgcacttatccgtggccttgcgcacctatggagctattgcacacagcctagcagtgcgtagcggtgtattcgcgatgttcaggcggcatgccgactgtacgccccgtatagcgatcggtaggccgtggcggtggcttcgccggctcgttggcgcccgaatatggcacgatacacctaaccatggccttgcgcacgtatggagctattgcacacagcctagcagtgcgtagcggcgtattcgcgatgttcaggcggcatgccgactgtacgccccgtatagcgatcggtaggccgtggcggtggcttcgccggctcgtcggggcccgaatatgacacgatgcacttatccgtggccttgcgcacctatggagctattgcacacagcctagcagtgcgtagcggcgtattcgcgatgttcaggcggcatgccgactgtacgccccgtatagcgatcggtaggccgtggcggtggcttcgccggctcgtcggggcccgaatatgacacgatgcacttatccgtggccttgcgcacctatggagctattgcacacagcctagcagtgcgtagcggtgtattcgcgatgttcaggcggcatgccgactgtacgccccgtatagcgatcggtaggccgtggcggtggcttcgccggctcgttggcgcccgaatatggcacgatacacctaaccatggccttgcgcacgtatggagctattgcacacagcctagcagtgcgtagtggtgtattcgcgatgttcaggcggcatgccgactgtacgccccgtatagcgatcggtaggccgtggcggtggcttcgccggctcgtcggggcccgaatatgacacgatgcacttatccgtggccttgcgcacctatggagctattgcacacagcctagcagtgcgtagtggtgtattcgcgatgttcaggcggcatgccgactgtacgccccgtatagcgatcggtaggccgtggcggtggcttcgccggctcgttggcgcccgaatatggcacgatgcacttatccgtggccttgcgcacctatggagctattgcacacagcctagcagtgcgtagcggtgtattcgcgatgttcaggcggcatgccgactgtacgccccgtatagcgatcggtaggccgtggcggtggcttcgccggctcgtcggggcccgaatatgacacgatgcacttatccgtggccttgcgcacctatggagctattgcacacagcctagcagtgcgtagcggcgtattcgcgatgttcaggcggcatgccgactgtacgccccgtatagcgatcggtaggccgtggcggtggcttcgccggctcgtcggggcccgaatatgacacgatgcacttatccgtggccttgcgcacctatggagctattgcacacagcctagcagtgcgtagcggcgtattcgcgatgttcaggcggcatgccgactgtacgccccgtatagcgatcggtaggccgtggcggtggcttcgccggctcgtcggggcccgaatatgacacgatgcacttatccgtggccttgcgcacctatggagctattgcacacagcctagcagtgcgtagcggcgtattcgcgatgttcaggcggcatgccgactgtacgccccgtatagcgatcggtaggccgtggcggtggcttcgccggctcgtcggggcccgaatatgacacgatgcacttatccgtggccttgcgcacctatggagctattgcacacagcctagcagtgcgtagcggtgtattcgcgatgttcaggcggcatgccgactgtacgccccgtatagcgatcggtaggccgtggcggtggcttcgccggctcgtcggggcccgaatatgacacgatgcacttatccgtggccttgcgcacctatggagctattgcacacagcctagcagtgcgtagcggcgtattcgcgatgttcaggcggcatgccgactgtacgccccgtatagcgatcggtaggccgtggcggtggcttcgccggctcgtcggggcccgaatatggcacgatgcacttatccgtggccttgcgcacctatggagctattgcacacagcctgcggtgtattcgcgatgttcaggcggcatgccgactgtacgccccgtatagcgatcggtaggccgtggcggtggcttcgccggctcgtcggggcccgaatatgacacgatgcacttatccgtggccttgcgcacctatggagctattgcacacagcctagcagtgcgtagcggcgtattcgcgatgttcaggcggcatgccgactgtacgccccgtatagcgatcggtaggccgtggcggtggcttcgccggctcgtcggggcccgaatatgacacgatgcacttatccgtggccttgcgcacctatggagctattgcacacagcctagcagtgcgtagcggtgtattcgcgatgttcaggcggcatgccgactgtacgccccgtatagcgatcggtaggccgtggcggtggcttcgccggctcgtcggggcccgaatatgacacgatgcacttatccgtggccttgcgcacctatggagctattgcacacagcctagcagtgcgtagcggtgtattcgcgatgttcaggcggcatgccgactgtacgccccgtatagcgatcggtaggccgtggcggtggcttcgccggctcgtcggggcccgaatatgacacgatgcacttatccgtggccttgcgcacctatggagctattgcacacagcctagcagtgcgtagcggcgtattcgcgatgttcaggcggcatgccgactgtacgccccgtatagcgatcggtaggccgtggcggtggcttcgccggctcgtcggggcccgaatatgacacgatgcacttatccgtggccttgcgcacctatggagctattgcacacagcctagcagtgcgtagcggtgtattcgcgatgttcaggcggcatgccgactgtacgccccgtatagcgatcggtaggccgtggcggtggcttcgccggctcgtcggggcccgaatatgacacgatgcacttatccgtggccttgcgcacctatggagctattgcacacagcctagcagtgcgtagcggcgtattcgcgatgttcaggcggcatgccgactgtacgccccgtatagcgatcggtaggccgtggcggtggcttcgccggctcgtcggggcccgaatatgacacgatgcacttatccgtggccttgcgcacctatggagctattgcacacagcctagcagtgcgtagcggcgtattcgcgatgttcaggcggcatgccgactgtacgccccgtatagcgatcggtaggccgtggcggtggcttcgccggctcgtcggggcccgaatatgacacgatgcacttatccgtggccttgcgcacctatggagctattgcacacagcctagcagtgcgtagcggtgtattcgcgatgttcaggcggcatgccgactgtacgccccgtatagcgatcggtaggccgtggcggtggcttcgccggctcgttggcgcccgaatatggcacgatacacctaaccatggccttgcgcacgtatggagctattgcacacagcctagcagtgcgtagtggtgtattcgcgatgttcaggcggcatgccgactgtacgccccgtatagcgatcggtaggccgtggcggtggcttcgccggctcgtcggggcccgaatatgacacgatgcacttnnnnnnnnnnnnnnnnnnnnnnnnnnnnnnnnnnnnnnnnnnnnnnnnnnnnnnnnnnnnnnnnnnnnnnnnnnnnnnnnnnnnnnnnnnnnnnnnnnnnnnnnnnnnnnnnnnnnnnnnnnnnnnnnnnnnnnnnnnnnnnnnnnnnnnnnnnnnnnnnnnnnnnnnnnnnnnnnnnnnnnnnnnnnnnnnnnnnnnnnnnnnnnnnnnnnnnnnnnnnnnnnnnnnnnnnnnnnnnnnnnnnnnnnnnnnnnnnnnnnnnnnnnnnnnnnnnnnnnnnnnnnnnnnnnnnnnnnnnnnnnnnnnnnnnnnnnnnnnnnnnnnnnnnnnnnnnnnnnnnnnnnnnnnnnnnnnnnnnnnnnnnnnnnnnnnnnnnnnnnnnnnnnnnnnnnnnnnnnnnnnnnnnnnnnnnnnnnnnnnnnnnnnnnnnnnnnnnnnnnnnnnnnnnnnnnnnnnnnnnnnnnnnnnnnnnnnnnnnnnnnnnnnnnnnnnnnnnnnnnnnnnnnnnnnnnnnnnnnnnnnnnnnnnnnnnnnnnnnnnnnnnnnnnnnnnnnnnnnnnnnnnnnnnnnnnnnnnnnnnnnnnnnnnnnnnnnnnnnnnnnnnnnnnnnnnnnnnnnnnnnnnnnnnnnnnnnnnnnnnnnnnnnnnnnnnnnnnnnnnnnnnnnnnnnnnnnnnnnnnnnnnnnnnnnnnnnnnnnnnnnnnnnnnnnnnnnnnnnnnnnnnnnnnnnnnnnnnnnnnnnnnnnnnnnnnnnnnnnnnnnnnnnnnnnnnnnnnnnnnnnnnnnnnnnnnnnnnnnnnnnnnnnnnnnnnnnnnnnnnnnnnnnnnnnnnnnnnnnnnnnnnnnnnnnnnnnnnnnnnnnnnnnnnnnnnnnnnnnnnnnnnnnnnnnnnnnnnnnnnnnnnnnnnnnnnnnnnnnnnnnnnnnnnnnnnnnnnnnnnnnnnnnnnnnnnnnnnnnnnnnnnnnnnnnnnnnnnnnnnnnnnnnnnnnnnnnnnnnnnnnnnnnnnnnnnnnnnnnnnnnnnnnnnnnnnnnnnnnnnnnnnnnnnnnnnnnnnnnnnnnnnnnnnnnnnnnnnnnnnnnnnnnnnnnnnnnnnnnnnnnnnnnnnnnnnnnnnnnnnnnnnnnnnnnnnnnnnnnnnnnnnnnnnnnnnnnnnnnnnnnnnnnnnnnnnnnnnnnnnnnnnnnnnnnnnnnnnnnnnnnnnnnnnnnnnnnnnnnnnnnnnnnnnnnnnnnnnnnnnnnnnnnnnnnnnnnnnnnnnnnnnnnnnnnnnnnnnnnnnnnnnnnnnnnnnnnnnnnnnnnnnnnnnnnnnnnnnnnnnnnnnnnnnnnnnnnnnnnnnnnnnnnnnnnnnnnnnnnnnnnnnnnnnnnnnnnnnnnnnnnnnnnnnnnnnnnnnnnnnnnnnnnnnnnnnnnnnnnnnnnnnnnnnnnnnnnnnnnnnnnnnnnnnnnnnnnnnnnnnnnnnnnnnnnnnnnnnnnnnnnnnnnnnnnnnnnnnnnnnnnnnnnnnnnnnnnnnnnnnnnnnnnnnnnnnnnnnnnnnnnnnnnnnnnnnnnnnnnnnnnnnnnnnnnnnnnnnnnnnnnnnnnnnnnnnnnnnnnnnnnnnnnnnnnnnnnnnnnnnnnnnnnnnnnnnnnnnnnnnnnnnnnnnnnnnnnnnnnnnnnnnnnnnnnnnnnnnnnnnnnnnnnnnnnnnnnnnnnnnnnnnnnnnnnnnnnnnnnnnnnnnnnnnnnnnnnnnnnnnnnnnnnnnnnnnnnnnnnnnnnnnnnnnnnnnnnnnnnnnnnnnnnnnnnnnnnnnnnnnnnnnnnnnnnnnnnnnnnnnnnnnnnnnnnnnnnnnnnnnnnnnnnnnnnnnnnnnnnnnnnnnnnnnnnnnnnnnnnnnnnnnnnnnnnnnnnnnnnnnnnnnnnnnnnnnnnnnnnnnnnnnnnnnnnnnnnnnnnnnnnnnnnnnnnnnnnnnnnnnnnnnnnnnnnnnnnnnnnnnnnnnnnnnnnnnnnnnnnnnnnnnnnnnnnnnnnnnnnnnnnnnnnnnnnnnnnnnnnnnnnnnnnnnnnnnnnnnnnnnnnnnnnnnnnnnnnnnnnnnnnnnnnnnnnnnnnnnnnnnnnnnnnnnnnnnnnnnnnnnnnnnnnnnnnnnnnnnnnnnnnnnnnnnnnnnnnnnnnnnnnnnnnnnnnnnnnnnnnnnnnnnnnnnnnnnnnnnnnnnnnnnnnnnnnnnnnnnnnnnnnnnnnnnnnnnnnnnnnnnnnnnnnnnnnnnnnnnnnnnnnnnnnnnnnnnnnnnnnnnnnnnnnnnnnnnnnnnnnnnnnnnnnnnnnnnnnnnnnnnnnnnnnnnnnnnnnnnnnnnnnnnnnnnnnnnnnnnnnnnnnnnnnnnnnnnnnnnnnnnnnnnnnnnnnnnnnnnnnnnnnnnnnnnnnnnnnnnnnnnnnnnnnnnnnnnnnnnnnnnnnnnnnnnnnnnnnnnnnnnnnnnnnnnnnnnnnnnnnnnnnnnnnnnnnnnnnnnnnnnnnnnnnnnnnnnnnnnnnnnnnnnnnnnnnnnnnnnnnnnnnnnnnnnnnnnnnnnnnnnnnnnnnnnnnnnnnnnnnnnnnnnnnnnnnnnnnnnnnnnnnnnnnnnnnnnnnnnnnnnnnnnnnnnnnnnnnnnnnnnnnnnnnnnnnnnnnnnnnnnnnnnnnnnnnnnnnnnnnnnnnnnnnnnnnnnnnnnnnnnnnnnnnnnnnnnnnnnnnnnnnnnnnnnnnnnnnnnnnnnnnnnnnnnnnnnnnnnnnnnnnnnnnnnnnnnnnnnnnnnnnnnnnnnnnnnnnnnnnnnnnnnnnnnnnnnnnnnnnnnnnnnnnnnnnnnnnnnnnnnnnnnnnnnnnnnnnnnnnnnnnnnnnnnnnnnnnnnnnnnnnnnnnnnnnnnnnnnnnnnnnnnnnnnnnnnnnnnnnnnnnnnnnnnnnnnnnnnnnnnnnnnnnnnnnnnnnnnnnnnnnnnnnnnnnnnnnnnnnnnnnnnnnnnnnnnnnnnnnnnnnnnnnnnnnnnnnnnnnnnnnnnnnnnnnnnnnnnnnnnnnnnnnnnnnnnnnnnnnnnnnnnnnnnnnnnnnnnnnnnnnnnnnnnnnnnnnnnnnnnnnnnnnnnnnnnnnnnnnnnnnnnnnnnnnnnnnnnnnnnnnnnnnnnnnnnnnnnnnnnnnnnnnnnnnnnnnnnnnnnnnnnnnnnnnnnnnnnnnnnnnnnnnnnnnnnnnnnnnnnnnnnnnnnnnnnnnnnnnnnnnnnnnnnnnnnnnnnnnnnnnnnnnnnnnnnnnnnnnnnnnnnnnnnnnnnnnnnnnnnnnnnnnnnnnnnnnnnnnnnnnnnnnnnnnnnnnnnnnnnnnnnnnnnnnnnnnnnnnnnnnnnnnnnnnnnnnnnnnnnnnnnnnnnnnnnnnnnnnnnnnnnnnnnnnnnnnnnnnnnnnnnnnnnnnnnnnnnnnnnnnnnnnnnnnnnnnnnnnnnnnnnnnnnnnnnnnnnnnnnnnnnnnnnnnnnnnnnnnnnnnnnnnnnnnnnnnnnnnnnnnnnnnnnnnnnnnnnnnnnnnnnnnnnnnnnnnnnnnnnnnnnnnnnnnnnnnnnnnnnnnnnnnnnnnnnnnnnnnnnnnnnnnnnnnnnnnnnnnnnnnnnnnnnnnnnnnnnnnnnnnnnnnnnnnnnnnnnnnnnnnnnnnnnnnnnnnnnnnnnnnnnnnnnnnnnnnnnnnnnnnnnnnnnnnnnnnnnnnnnnnnnnnnnnnnnnnnnnnnnnnnnnnnnnnnnnnnnnnnnnnnnnnnnnnnnnnnnnnnnnnnnnnnnnnnnnnnnnnnnnnnnnnnnnnnnnnnnnnnnnnnnnnnnnnnnnnnnnnnnnnnnnnnnnnnnnnnnnnnnnnnnnnnnnnnnnnnnnnnnnnnnnnnnnnnnnnnnnnnnnnnnnnnnnnnnnnnnnnnnnnnnnnnnnnnnnnnnnnnnnnnnnnnnnnnnnnnnnnnnnnnnnnnnnnnnnnnnnnnnnnnnnnnnnnnnnnnnnnnnnnnnnnnnnnnnnnnnnnnnnnnnnnnnnnnnnnnnnnnnnnnnnnnnnnnnnnnnnnnnnnnnnnnnnnnnnnnnnnnnnnnnnnnnnnnnnnnnnnnnnnnnnnnnnnnnnnnnnnnnnnnnnnnnnnnnnnnnnnnnnnnnnnnnnnnnnnnnnnnnnnnnnnnnnnnnnnnnnnnnnnnnnnnnnnnnnnnnnnnnnnnnnnnnnnnnnnnnnnnnnnnnnnnnnnnnnnnnnnnnnnnnnnnnnnnnnnnnnnnnnnnnnnnnnnnnnnnnnnnnnnnnnnnnnnnnnnnnnnnnnnnnnnnnnnnnnnnnnnnnnnnnnnnnnnnnnnnnnnnnnnnnnnnnnnnnnnnnnnnnnnnnnnnnnnnnnnnnnnnnnnnnnnnnnnnnnnnnnnnnnnnnnnnnnnnnnnnnnnnnnnnnnnnnnnnnnnnnnnnnnnnnnnnnnnnnnnnnnnnnnnnnnnnnnnnnnnnnnnnnnnnnnnnnnnnnnnnnnnnnnnnnnnnnnnnnnnnnnnnnnnnnnnnnnnnnnnnnnnnnnnnnnnnnnnnnnnnnnnnnnnnnnnnnnnnnnnnnnnnnnnnnnnnnnnnnnnnnnnnnnnnnnnnnnnnnnnnnnnnnnnnnnnnnnnnnnnnnnnnnnnnnnnnnnnnnnnnnnnnnnnnnnnnnnnnnnnnnnnnnnnnnnnnnnnnnnnnnnnnnnnnnnnnnnnnnnnnnnnnnnnnnnnnnnnnnnnnnnnnnnnnnnnnnnnnnnnnnnnnnnnnnnnnnnnnnnnnnnnnnnnnnnnnnnnnnnnnnnnnnnnnnnnnnnnnnnnnnnnnnnnnnnnnnnnnnnnnnnnnnnnnnnnnnnnnnnnnnnnnnnnnnnnnnnnnnnnnnnnnnnnnnnnnnnnnnnnnnnnnnnnnnnnnnnnnnnnnnnnnnnnnnnnnnnnnnnnnnnnnnnnnnnnnnnnnnnnnnnnnnnnnnnnnnnnnnnnnnnnnnnnnnnnnnnnnnnnnnnnnnnnnnnnnnnnnnnnnnnnnnnnnnnnnnnnnnnnnnnnnnnnnnnnnnnnnnnnnnnnnnnnnnnnnnnnnnnnnnnnnnnnnnnnnnnnnnnnnnnnnnnnnnnnnnnnnnnnnnnnnnnnnnnnnnnnnnnnnnnnnnnnnnnnnnnnnnnnnnnnnnnnnnnnnnnnnnnnnnnnnnnnnnnnnnnnnnnnnnnnnnnnnnnnnnnnnnnnnnnnnnnnnnnnnnnnnnnnnnnnnnnnnnnnnnnnnnnnnnnnnnnnnnnnnnnnnnnnnnnnnnnnnnnnnnnnnnnnnnnnnnnnnnnnnnnnnnnnnnnnnnnnnnnnnnnnnnnnnnnnnnnnnnnnnnnnnnnnnnnnnnnnnnnnnnnnnnnnnnnnnnnnnnnnnnnnnnnnnnnnnnnnnnnnnnnnnnnnnnnnnnnnnnnnnnnnnnnnnnnnnnnnnnnnnnnnnnnnnnnnnnnnnnnnnnnnnnnnnnnnnnnnnnnnnnnnnnnnnnnnnnnnnnnnnnnnnnnnnnnnnnnnnnnnnnnnnnnnnnnnnnnnnnnnnnnnnnnnnnnnnnnnnnnnnnnnnnnnnnnnnnnnnnnnnnnnnnnnnnnnnnnnnnnnnnnnnnnnnnnnnnnnnnnnnnnnnnnnnnnnnnnnnnnnnnnnnnnnnnnnnnnnnnnnnnnnnnnnnnnnnnnnnnnnnnnnnnnnnnnnnnnnnnnnnnnnnnnnnnnnnnnnnnnnnnnnnnnnnnnnnnnnnnnnnnnnnnnnnnnnnnnnnnnnnnnnnnnnnnnnnnnnnnnnnnnnnnnnnnnnnnnnnnnnnnnnnnnnnnnnnnnnnnnnnnnnnnnnnnnnnnnnnnnnnnnnnnnnnnnnnnnnnnnnnnnnnnnnnnnnnnnnnnnnnnnnnnnnnnnnnnnnnnnnnnnnnnnnnnnnnnnnnnnnnnnnnnnnnnnnnnnnnnnnnnnnnnnnnnnnnnnnnnnnnnnnnnnnnnnnnnnnnnnnnnnnnnnnnnnnnnnnnnnnnnnnnnnnnnnnnnnnnnnnnnnnnnnnnnnnnnnnnnnnnnnnnnnnnnnnnnnnnnnnnnnnnnnnnnnnnnnnnnnnnnnnnnnnnnnnnnnnnnnnnnnnnnnnnnnnnnnnnnnnnnnnnnnnnnnnnnnnnnnnnnnnnnnnnnnnnnnnnnnnnnnnnnnnnnnnnnnnnnnnnnnnnnnnnnnnnnnnnnnnnnnnnnnnnnnnnnnnnnnnnnnnnnnnnnnnnnnnnnnnnnnnnnnnnnnnnnnnnnnnnnnnnnnnnnnnnnnnnnnnnnnnnnnnnnnnnnnnnnnnnnnnnnnnnnnnnnnnnnnnnnnnnnnnnnnnnnnnnnnnnnnnnnnnnnnnnnnnnnnnnnnnnnnnnnnnnnnnnnnnnnnnnnnnnnnnnnnnnnnnnnnnnnnnnnnnnnnnnnnnnnnnnnnnnnnnnnnnnnnnnnnnnnnnnnnnnnnnnnnnnnnnnnnnnnnnnnnnnnnnnnnnnnnnnnnnnnnnnnnnnnnnnnnnnnnnnnnnnnnnnnnnnnnnnnnnnnnnnnnnnnnnnnnnnnnnnnnnnnnnnnnnnnnnnnnnnnnnnnnnnnnnnnnnnnnnnnnnnnnnnnnnnnnnnnnnnnnnnnnnnnnnnnnnnnnnnnnnnnnnnnnnnnnnnnnnnnnnnnnnnnnnnnnnnnnnnnnnnnnnnnnnnnnnnnnnnnnnnnnnnnnnnnnnnnnnnnnnnnnnnnnnnnnnnnnnnnnnnnnnnnnnnnnnnnnnnnnnnnnnnnnnnnnnnnnnnnnnnnnnnnnnnnnnnnnnnnnnnnnnnnnnnnnnnnnnnnnnnnnnnnnnnnnnnnnnnnnnnnnnnnnnnnnnnnnnnnnnnnnnnnnnnnnnnnnnnnnnnnnnnnnnnnnnnnnnnnnnnnnnnnnnnnnnnnnnnnnnnnnnnnnnnnnnnnnnnnnnnnnnnnnnnnnnnnnnnnnnnnnnnnnnnnnnnnnnnnnnnnnnnnnnnnnnnnnnnnnnnnnnnnnnnnnnnnnnnnnnnnnnnnnnnnnnnnnnnnnnnnnnnnnnnnnnnnnnnnnnnnnnnnnnnnnnnnnnnnnnnnnnnnnnnnnnnnnnnnnnnnnnnnnnnnnnnnnnnnnnnnnnnnnnnnnnnnnnnnnnnnnnnnnnnnnnnnnnnnnnnnnnnnnnnnnnnnnnnnnnnnnnnnnnnnnnnnnnnnnnnnnnnnnnnnnnnnnnnnnnnnnnnnnnnnnnnnnnnnnnnnnnnnnnnnnnnnnnnnnnnnnnnnnnnnnnnnnnnnnnnnnnnnnnnnnnnnnnnnnnnnnnnnnnnnnnnnnnnnnnnnnnnnnnnnnnnnnnnnnnnnnnnnnnnnnnnnnnnnnnnnnnnnnnnnnnnnnnnnnnnnnnnnnnnnnnnnnnnnnnnnnnnnnnnnnnnnnnnnnnnnnnnnnnnnnnnnnnnnnnnnnnnnnnnnnnnnnnnnnnnnnnnnnnnnnnnnnnnnnnnnnnnnnnnnnnnnnnnnnnnnnnnnnnnnnnnnnnnnnnnnnnnnnnnnnnnnnnnnnnnnnnnnnnnnnnnnnnnnnnnnnnnnnnnnnnnnnnnnnnnnnnnnnnnnnnnnnnnnnnnnnnnnnnnnnnnnnnnnnnnnnnnnnnnnnnnnnnnnnnnnnnnnnnnnnnnnnnnnnnnnnnnnnnnnnnnnnnnnnnnnnnnnnnnnnnnnnnnnnnnnnnnnnnnnnnnnnnnnnnnnnnnnnnnnnnnnnnnnnnnnnnnnnnnnnnnnnnnnnnnnnnnnnnnnnnnnnnnnnnnnnnnnnnnnnnnnnnnnnnnnnnnnnnnnnnnnnnnnnnnnnnnnnnnnnnnnnnnnnnnnnnnnnnnnnnnnnnnnnnnnnnnnnnnnnnnnnnnnnnnnnnnnnnnnnnnnnnnnnnnnnnnnnnnnnnnnnnnnnnnnnnnnnnnnnnnnnnnnnnnnnnnnnnnnnnnnnnnnnnnnnnnnnnnnnnnnnnnnnnnnnnnnnnnnnnnnnnnnnnnnnnnnnnnnnnnnnnnnnnnnnnnnnnnnnnnnnnnnnnnnnnnnnnnnnnnnnnnnnnnnnnnnnnnnnnnnnnnnnnnnnnnnnnnnnnnnnnnnnnnnnnnnnnnnnnnnnnnnnnnnnnnnnnnnnnnnnnnnnnnnnnnnnnnnnnnnnnnnnnnnnnnnnnnnnnnnnnnnnnnnnnnnnnnnnnnnnnnnnnnnnnnnnnnnnnnnnnnnnnnnnnnnnnnnnnnnnnnnnnnnnnnnnnnnnnnnnnnnnnnnnnnnnnnnnnnnnnnnnnnnnnnnnnnnnnnnnnnnnnnnnnnnnnnnnnnnnnnnnnnnnnnnnnnnnnnnnnnnnnnnnnnnnnnnnnctatacggggcgtacagtcggcatgccgcctgaacatcgcgaatacgccgctacgaactgctaggctgtgtgcaatagctccatacgtgcgcaaggccacggttaggtgtatcgtgccatattcgggcgccaacgagccggcgaagccaccgccacggcctaccgatcgctatacggggcgtacagtcggcatgccgcctgaacatcgcgaatacaccgctatgcactgctaggctgtgtgcaatagctccatacgtgcgcaaggccacggataagtgcatcgtgtcatattcgggccccgacgagccggcgaagccaccgccacggcctaccgatcgctatacggggcgtacagtcggcatgccgcctgaacatcgcgaatacaccgctacgcactgctaggctgtgtgcaatagctccatacgtgcgcaaggccacggataagtgcatcgtgtcatattcgggccccgacgagccggcgaagccaccgccacggcctaccgatcgctatacggggcgtacagtcggcatgccgcctgaacatcgcgaatacaccgctacgcactgctaggctgtgtacaatagctccatacgtgcgcaaggccacggataagtgtatcgtgccatattcgggccccgacgagccggcgaagccaccgccacggcctaccgatcgctatacggggcgtacagtcggcatgccgcctgaacatcgcgaatacaccgctacgcactgctaggctgtgtgcaatagctccataggtgcgcaaggccacggataagtgcatcgtgtcatattcgggccccgacgagccggcgaagccaccgccacggcctaccgatcgctatacggggcgtacagtcggcatgccgcctgaacatcgcgaatacaccgctacgcactgctaggctgtgtgcaatagctccatacgtgcgcaaggccacggataagtgcatcgtgtcatattcgggccccgacgagccggcgaagccaccgccacggcctaccgatcgctatacggggcgtacagtcggcatgccgcctgaacatcgcgaatacaccgctacgcactgctaggctgtgtgcaatagctccataggtgcgcaaggccacggataagtgcatcgtgtcatattcgggccccgacgagccggcgaagccaccgccacggcctaccgatcgctatacggggcgtacagtcggcatgccgcctgaacatcgcgaatacgccgctacgcactgctaggctgtgtgcaatagctccatacgtgcgcaaggccacggataagtgtatcgtgccatattcgggccccgacgagccggcgaagccaccgccacggcctaccgatcgctatacggggcgtacagtcggcatgccgcctgaacatcgcgaatacaccgctacgcactgctaggctgtgtgcaatagctccatacgtgcgcaaggccacggataagtgcatcgtgtcatattcgggccccgacgagccggcgaagccaccgccacggcctaccgatcgctatacggggcgtacagtcggcatcccgcctgaacatcgcgaatacgccgctacgcactgctaggctgtgtgcaatagctccataggtgcgcaaggccacggataagtgcatcgtgtcatattcgggccccgacgagccggcgaagccaccgccacggcctaccgatcgctatacggggcgtacagtcggcatgccgcctgaacatcgcgaatacgccgctacgcactgctaggctgtgtgcaatagctccataggtgcgcaaggccacggttaggtgcatcgcgccatgttcgggcgccaacgagccggcgaagtcaccgccacggcctaccgatcgctatacggggcgtacagtcggcatgccgcctgaacatcgcgaatacgccgcccggactcgcgattgcagtgtacaaggtttggtgaccctggatggagatgtccccaagggaggaccccggccggagccaagtatcgaacgagaggcaaaacccaagggagcgtagaagtgcctccgactggaggccacctactcttggtgtactgtacaacgcaagaggagcccgaccggatcaagtgaagacccagaagccgtgaagttgtccaagacatcccggatgtgaagcccaagtggagtgcgatcccgtttggagataatcctggatcccggatggatataccaagagaccatcccagctgtggtgatccagtatacaaagtccaagatgtttccgaccagccaatatctgttcggattccgtggaacattgaaaatcgcttgcgtacccagtgatgattatacttgctgaaagtatgctacgagggaccacggacgattgcgacggcaaggccatagtgaagccaagtcaagatggagtgcatgtagagatcgacagaagatagccatacagacagacagagagacaacagataacagataaacagagttcgttttgccaaggatcgcacaagtgagttggagcagcctaccggacgtgcattcccagaggaccgactaagtctacgtgtgagggcccagcaattgtcacatctgggtcgagctcccgcaaccaagtccagtccaagttggggtgagtaccggcaccaacccgaggctgattcatcccatttcatttcctagttgccgttgagttcgtccagacctgattacctttcacccctggttggagtagccccgtgtggaaagtattgatttaagtgctatgtgtgataggaggtaattgattgttttagtttccctcagtactcgagggtggtgcgcgtgagccaaaaccgaccgggatcgaccggtgtcctcgagtccggctggagttgactggagtagtgaccgacccttgtacggtccaaacgactaaggaaaggctatgtgtttgcatataactctgtatctgtttgtattgtttggttatctgaggctgtcagaggcgacgtccaggaaggttacgttctgccctgctgcctagcgacctacaagtatccagacaactcattcacggttaaagacccctggttacgaagacaaacgaagccacagggattgttcacaaggacacacgccgacccgattggagtgtacatctaggtgtaccatctacggctaggtttgttctgggtgcaccccattcgggagtcttcatccagggcgcgctaactatacaccagggcggtcaggcgttcccccgcctcgcctcaccctgatcatcgcgtacccgctgctacgtaatgctaagagcgctgtccgtttagaaaatcgatcgattttcccctgccaatttatttccgcttacggaaaaatgagggtccaagaaatcgtctccatgtccaagtagaaaagtggtttcgctaatttatttgatcaaacctatccaatcgcatagctgtatatattggatatttgataggtttcgtttcgcacttcaactctgctagaagaaggcaacaaatatcgacttccaagtgatttactgctctgcgcagcgggcaggcccaaacgacaatatactgtggttcgacaggacgctgcgccatcatcactcccgtcggcgtcgcgcttggcggcgcgcgttcgaagggtatcccacagcttcctgctcgtcacaatgccctcctcccatgtcggcggcactttctagaacggattacatgtacattttcttaagcgccacgtagatgatgagagctgccacgtatgcgtcgcgcgctccagatcacggctgaccatagccgaaaaatggctcacatcgcgcgaaatggcgggttataatgagcccggctttatgaggatcgaactgtgctcttatcctcgctcgcgcacaacgttgaccacggcgatcgcgtacatggccgtcgggaacacacttaccatgaggtgaggcgaggtcgtagttgagtgggctctcggtgtgcgcaggtgtgatacgacgccactgagcaaccggcccttggacgatcagtcccggtacggactcctatcatatgcgttttctagatagcatcccgcatcttactacagtagcgtagatggctggctgaccggtgtttggtagttgaagttctctacaatattcaaactaatatttaaaggagctgtgcgcctctatacctgcattcgcacgcagcatacatgagctcgacatcaatagtacttgtgcggtgatcgcggagggtgcaacttgcattcgacgccgcgcttgacgtagcgttcgccgccatacgtgggggccgtcttcctccagcttttcactcgctcctcacaataatccgtcgccgcccaaaagaaattggtggtgcaccaatttctttttactgcattataacgaggcgtttcggccacctagtttttcttaacgctacttcagagaaaaaaaggtgaaaaaaataaatcgattttctaaccgatcaactctctaagctgagtgcaatagatcaataggtgcgcaaggccacggtttaggtgcatcctgccatgttcgagccccaacgagccgtggaagccaccgcgacggccttccgtgtgctatccaggacgtacagtcggcatgcatcctgatcatcgcgaatccgccgctacgtactgttaagacgagtgcaatagatccatgggtgcgcaaggacacggctaggtgcatcgtgtcaaggtttgcctaaccgtgttcttgcgcacctattgatctattgcactctctctaggctgtggaccactaccgcgtagaaagcctccgtccccattcgcaccttggctcctcagcaattcctcagtagccgcctgccgaccgtagctacggcaaaagagcttgttggtgccaaatgagggtaccgcatgccgagacgcatccaatgagccactccacgctgactaccaccgcgtagaaagcggattcgcctataatccagttggtcagtgtgtaattgcttcactacatgtagatattctagaatgaccatgctcgctcgttctgcgctgacacgattgccttcgaaatcttgctgtctgaataccagggctcctgatcatggcatggtaaaaactataatgtcaaatattttgttattgattatttattgcagtcggttgggcccgaccacatttttttatgtcgggaggtcccagcaataactgctcctcgatgatgtttttaatgggataggaagcaacgttagtgctgctatcgcagaccaaataggattataatcgtggtacagcaagtcaaacgatgacccctcttgacatctaactggtatattttcttgaaaccggtgcgactccggtgccgcactgggccctccaaaaggttcatatgcgtgggcagatcgaaccggtgtgctaccggcgacactggtgaatcagtgcatatattgagcagggtacggatggacgaagtggagtgaagagaacgcttggactgtacattagcactagagatactaagtatgcatttgcattttctacaagctgcaaaacatatctcaaccaaggctcgcattttttaattttgtatagcattgccggttgatatcttgcatctacaacattacttaagtaagaaaaaatccgagcagatgctgcggctgcgaagcaggcgcaggagatgaccgtagctagtaagaaacgaaattaataacaactgacaaaagaagggtttactccaaaattctcctatcccagccttcgcggagccctagtaaatacagggactttcgtacaaaaaatcaagttattttatctaaatgtcaagaaattattgattatgatcgctttcgaagctacattagggctgatgccattatttttatttatgagtcagatgaaccatcgataaataaaaataccataatcaggagcccggcactcagtgagttctgattcactgtgagctgggatagatttgagatacttcagtagtttcactccctctgactgaaacatggactgtgtattttcctgtttttctctgcaagtacactgcgcgacataatctttcggacactcacatttttgtccatatatcagcttctagaaaccgttagagctcgctatttagatatgttgtacctatccgatcaatctatagctggcatgtgacgcggacttagatttctgagcgcgtagataggctagtatacaactgacacgattccggaccgcgacaaagttttcggacaatttttatcttgattaaagtatgtcctgcaatgatgggtacatcaaatcagccaatcagcgtcctatgtcggcgctaatgcacacatttgcgtctatttcacggcaacatgtatcaaaatagagcctaattttcgttagaagaggttagatagactagtggtctacctaagagaatcgttgccgcaactctgagcactttgccggtgtggatgagttgtgtcgagttacgcgaagcagttgtgtgcgaagggctagccgagtacaggaatgaaagtgtgtacttcagtgtaaaattggttgtgattcttgttgtttaagtgttgttgtaggcgaaagcttttcaagcggaaaaaaacccgtagactctatctgactactatggccgcagccatgagagtacagcacgcatgctgtcgctcgtaactctcgagtcacaagctagtctctctcgcagtcaatgccttcaaccgtcactcgctactcgtagacattcaacaagtattctactatacatcttcatacattgttgttgcaacccaagtgacacggattgacctcagtcgaatctcttactcccacttaagttgggtttcacaacatatacaagcatacaatattatccctagcttagacgcatccaagttcaacgtgaatactgtctggatggcctcagccaatccctgtcgatccgcctttgagtcagcgcgcagttgagcaggttcgtggcttccacagaagtcacaggtatacccgcaggcacccaagccggagcattacaacatcgttgcgaacgtacagcttcacagtacagcttcattcattgcagcaataatctcaaattgtgacctggacgcatccaaatctacgtgtgagcacgtaagaaggcctcgggcaactcaatcgtcgctcatcacaatgtccgacgcattgtcagactcgctcgcagtcgccgcagcgacagtaggtccgccctcagaagtccacgccatttgcacggtatcaatcttgagcaggtcacgcagacgctcaaagacacacgggcccagtgctttcgtaaaaatatccgcaatattctcagttgtgggcacgtactccatttgcatgtgtccactatcgatccactcagcaatcgaccttgtctctttcgccaggtgcttcatcctctgcgaattgccattgttttcgacttctttcagggtactctggttgtcgcagtatagtgttgcgattttctgttgcgggattccaatatccttcagcagcttttgtgcccatttaatctctttcgtgcatttgtgggcggcaatcagctccgcagcacaggtgtcgtcagccacacttccctgcttcttgctctgccagtgccaaacattgccatttggcctcaaggtccaaccagaaacagatttgctcgtttcaggacacccggcgtgatctgcgtccgcaaacgcatcaatcaccacaccatcactagccactcctgcatagcgatataccaggccaaggtgcttggtaccacgcaagtaccgcagcacgcgttgtgcctgccggaagttctctactgtgtatgctcctccgtaccgaccaagtgtccgcaccacatttgccaaatcaggtctggtacagtgcactaggtattgtagagaccctattatctcgggaaatggcagcttcggatcattaatcaggttggggtttttctccactcgtacagttcgctcattgtgaacttgaggagaccgcactgattttgctgctgctaatccaaaattctcgagcatacgctcaacgtacgctgtctgcgagatgcacaatatcttacccggctcataattaatctccattcccaataggtgtttcacccgacccaagtccttcagtttgaacttcttgcccagcgcttccaccacgccgtcagcatctctcgggtctgcggcgatcagtatgtcatcaacctacacggtcaggaagattttgttgtgctttccttctctccaatatactccagcgtcaaacgtacacttcttgaacccgatctcaaccaggtgcttgtgaagcgtgttattctagattcgcgaggcttgctttagtccatatagtcctttaactaggcgacagactcgtccagcgccgtcgttgtagccctcaggctgctccataaaaatctcaacaccggtgagcacaccattcaggaacgcggtcacgaagtctacatgccgacagtcgagaccaaacagtagagctagcaacagtacgagccgtaccgactcgattctcactacaggtgagtacgtctccaaatagtcgagtccaaacttttgccgatatcccttaatcgccaatctcgccttgaaccgctctatccagcccttttcgtttcgtttgcacactaacacccacagtgatgtcagaatgttgacaggattgtccttcgtgtacttcggcctaggtaccaattcccacgtattgttcgtcatcaatgattcgtactccgtgtccatcgctttctgccacttgggtccgtgctcggatgcaagagcctccgtcacggttgtaggattcagcaggttgcacacagccccaatcatcatgcattgaaacagtgtctgagtcataaaaaactctgggggctgtatcgctgtgtttggcggcgggctggagtcgaccttcgtagtggaacagttggaggagtccgctgtgctcgccccccgctcccactagttccacgtcctcgtactgctgagggtgcgggagcacgtccagtattcgcagcaccaccagctctcccactacggccagcccctctagatctcccactagtccgtgcagtactcgatctacctgcgtcggtagtcacattatcaccagttgcgacttgcggtgtagcaggagtaacatcctccatgtcctcgcagccacccgaattaccgtcatcatcatcatcactactgctgctgtaatcactgctgtcatcctcacttacttcgttgtcgtcaaattgttccgccatgccgtcgtcggtgtcgtaaaatcctcttcttcatcttccatcagctcaggaatctcctcaaaccggtcactttcactctcagagtcagattcctcattctcgctcgcatctggtaaatgcacacggctaacgggaagcgagacgtagtcaatgtggtctggcagatcgacttccttctcaaagtacactttatcgatgagatcgtgcacgtatttaggatctgccgtcatatcttcataaaagacgacatctcggcgctccactacattgccagtacacaggtcgagaatacgatagccgagcgaggtagtcaaaaagtcaataccgcgcgaagccaagaaggccttcagcgcgttgttgagaaactcacctcctttgttactcgagaaaatattaatcacatgctccttttccaatttaagcagtagatccatagtgtgctggtttgcatcactcgtctccttcaggagaaagcaccacttaaatctcgaagcttcgtcttcgatgatctgaaaatagctatttcctccaggtgtcagcattccaacagggctaatgtctgacgtcagacgcgcaccacatctcttctgacgcttgccgtgtcgtcggaacgacatgcgcttttgtttcgcacgctgacaggcaatgcagcggaatggtaccttagaatctgcgagtgtcaggtccaaaccgcccaccatgtccattcagaccatcctcttcatcgcctccaagttcggatgtccaagttttatgtgccacgccatcaccgtatcaattttcggagtcgtagttgccgcgcagaccgggttgctaggcagtacaggggttgtatccagccaataatgcccatttcttttcctaaacaccatttgcacaccttcgtaatcgttgtgcgtgaagatcgtgactcgttcttctggtgacgctgcctttggcgttgtaggttcccatccgtcttgctccagttgctcttgactgatgaggttggtcgatcctctcgacgagtaccgcgtctccttcaagtccagcacaccatcaggtccgtcaggatccatgtcattttggacgcaaattttcacgaacctaataccgtatgagatgttactttcacctctccagtcgtcaaagaagttcgtatcctctctcatgccatatccgaatgcagactcacttgtgcacacatgcacagctgtaccagtatgtggcgtagtgggatcagcaaaacttgcaagattgccaatccaacttaccaactgcgcccgaacaccgacttacggaggggatcccccgatgatccgtgatctgtgtgctgaactggtcaccttgtgtacccgtcggtagggctggatctgctcctctggtgtctgctgaagcgtccgagccttgaagtcagaacagtctggtcgagacgcggggatgtgggtggagcagcgcggaaatcttcactctgcccgcagtagttactcccaatccagtggtagtcgacttggatccggcggcctggatttggatccggccgtggggttgcctttgggttgttgttgttcctttcctttgccttcgcaggtcttcctttgccgtacttgccgcttcctatatagatgctgagagtcgaggatgccaatgtattatccagtcttaaccaacgctagctccactaccagaaccttgctaagccgtggggccaatgtacttcccgtttccaggcgaagccacttgcgatgtataaggcagattcgagtctgatttatgcttaagtccaatcccatcccaaagtcctatcttcctatggatcctatcatcccatctgcacctactgactctatggggcttgattaccttccttgcgtgtcgcttgattgcctccgtcgagccataattttagatccaccgctcacttccatctgagtccgaatcagaatcagatctggattggatcggatcgcccatccacttgacagctgcatctcttggatcttgggtctcgaggcatggcgttgcttgggcacacattcgtgacgtccggtcgcactcgtagtgccttccgttgcaatctctaacacctggtacggggcccgatccgccagtctggtgggtccatcgcggagtctggatccatcattctgccgatcaccctttgtcccaatttcttggatcctgcttctccacaatcgccacctgtctgtagttgttgccgaccagcggcatcactgcagacacttgttcttactttcaagcccaccaagtatataatactatgtcagaccccgcccgtagcgcccctcgcacggcccctgctcaccatctccactatgacgggtatnnnnnnnnnnnnnnnnnnnnnnnnnnnnnnnnnnnnnnnnnnnnnnnnnnnnnnnnnnnnnnnnnnnnnnnnnnnnnnnnnnnnnnnnnnnnnnnnnnnnnnnnnnnnnnnnnnnnnnnnnnnnnnnnnnnnnnnnnnnnnnnnnnnnnnnnnnnnnnnnnnnnnnnnnnnnnnnnnnnnnnnnnnnnnnnnnnnnnnnnnnnnnnnnnnnnnnnnnnnnnnnnnnnnnnnnnnnnnnnnnnnnnnnnnnnnnnnnnnnnnnnnnnnnnnnnnnnnnnnnnnnnnnnnnnnnnnnnnnnnnnnnnnnnnnnnnnnnnnnnnnnnnnnnnnnnnnnnnnnnnnnnnnnnnnnnnnnnnnnnnnnnnnnnnnnnnnnnnnnnnnnnnnnnnnnnnnnnnnnnnnnnnnnnnnnnnnnnnnnnnnnnnnnnnnnnnnnnnnnnnnnnnnnnnnnnnnnnnnnnnnnnnnnnnnnnnnnnnnnnnnnnnnnnnnnnnnnnnnnnnnnnnnnnnnnnnnnnnnnnnnnnnnnnnnnnnnnnnnnnnnnnnnnnnnnnnnnnnnnnnnnnnnnnnnnnnnnnnnnnnnnnnnnnnnnnnnnnnnnnnnnnnnnnnnnnnnnnnnnnnnnnnnnnnnnnnnnnnnnnnnnnnnnnnnnnnnnnnnnnnnnnnnnnnnnnnnnnnnnnnnnnnnnnnnnnnnnnnnnnnnnnnnnnnnnnnnnnnnnnnnnnnnnnnnnnnnnnnnnnnnnnnnnnnnnnnnnnnnnnnnnnnnnnnnnnnnnnnnnnnnnnnnnnnnnnnnnnnnnnnnnnnnnnnnnnnnnnnnnnnnnnnnnnnnnnnnnnnnnnnnnnnnnnnnnnnnnnnnnnnnnnnnnnnnnnnnnnnnnnnnnnnnnnnnnnnnnnnnnnnnnnnnnnnnnnnnnnnnnnnnnnnnnnnnnnnnnnnnnnnnnnnnnnnnnnnnnnnnnnnnnnnnnnnnnnnnnnnnnnnnnnnnnnnnnnnnnnnnnnnnnnnnnnnnnnnnnnnnnnnnnnnnnnnnnnnnnnnnnnnnnnnnnnnnnnnnnnnnnnnnnnnnnnnnnnnnnnnnnnnnnnnnnnnnnnnnnnnnnnnnnnnnnnnnnnnnnnnnnnnnnnnnnnnnnnnnnnnnnnnnnnnnnnnnnnnnnnnnnnnnnnnnnnnnnnnnnnnnnnnnnnnnnnnnnnnnnnnnnnnnnnnnnnnnnnnnnnnnnnnnnnnnnnnnnnnnnnnnnnnnnnnnnnnnnnnnnnnnnnnnnnnnnnnnnnnnnnnnnnnnnnnnnnnnnnnnnnnnnnnnnnnnnnnnnnnnnnnnnnnnnnnnnnnnnnnnnnnnnnnnnnnnnnnnnnnnnnnnnnnnnnnnnnnnnnnnnnnnnnnnnnnnnnnnnnnnnnnnnnnnnnnnnnnnnnnnnnnnnnnnnnnnnnnnnnnnnnnnnnnnnnnnnnnnnnnnnnnnnnnnnnnnnnnnnnnnnnnnnnnnnnnnnnnnnnnnnnnnnnnnnnnnnnnnnnnnnnnnnnnnnnnnnnnnnnnnnnnnnnnnnnnnnnnnnnnnnnnnnnnnnnnnnnnnnnnnnnnnnnnnnnnnnnnnnnnnnnnnnnnnnnnnnnnnnnnnnnnnnnnnnnnnnnnnnnnnnnnnnnnnnnnnnnnnnnnnnnnnnnnnnnnnnnnnnnnnnnnnnnnnnnnnnnnnnnnnnnnnnnnnnnnnnnnnnnnnnnnnnnnnnnnnnnnnnnnnnnnnnnnnnnnnnnnnnnnnnnnnnnnnnnnnnnnnnnnnnnnnnnnnnnnnnnnnnnnnnnnnnnnnnnnnnnnnnnnnnnnnnnnnnnnnnnnnnnnnnnnnnnnnnnnnnnnnnnnnnnnnnnnnnnnnnnnnnnnnnnnnnnnnnnnnnnnnnnnnnnnnnnnnnnnnnnnnnnnnnnnnnnnnnnnnnnnnnnnnnnnnnnnnnnnnnnnnnnnnnnnnnnnnnnnnnnnnnnnnnnnnnnnnnnnnnnnnnnnnnnnnnnnnnnnnnnnnnnnnnnnnnnnnnnnnnnnnnnnnnnnnnnnnnnnnnnnnnnnnnnnnnnnnnnnnnnnnnnnnnnnnnnnnnnnnnnnnnnnnnnnnnnnnnnnnnnnnnnnnnnnnnnnnnnnnnnnnnnnnnnnnnnnnnnnnnnnnnnnnnnnnnnnnnnnnnnnnnnnnnnnnnnnnnnnnnnnnnnnnnnnnnnnnnnnnnnnnnnnnnnnnnnnnnnnnnnnnnnnnnnnnnnnnnnnnnnnnnnnnnnnnnnnnnnnnnnnnnnnnnnnnnnnnnnnnnnnnnnnnnnnnnnnnnnnnnnnnnnnnnnnnnnnnnnnnnnnnnnnnnnnnnnnnnnnnnnnnnnnnnnnnnnnnnnnnnnnnnnnnnnnnnnnnnnnnnnnnnnnnnnnnnnnnnnnnnnnnnnnnnnnnnnnnnnnnnnnnnnnnnnnnnnnnnnnnnnnnnnnnnnnnnnnnnnnnnnnnnnnnnnnnnnnnnnnnnnnnnnnnnnnnnnnnnnnnnnnnnnnnnnnnnnnnnnnnnnnnnnnnnnnnnnnnnnnnnnnnnnnnnnnnnnnnnnnnnnnnnnnnnnnnnnnnnnnnnnnnnnnnnnnnnnnnnnnnnnnnnnnnnnnnnnnnnnnnnnnnnnnnnnnnnnnnnnnnnnnnnnnnnnnnnnnnnnnnnnnnnnnnnnnnnnnnnnnnnnnnnnnnnnnnnnnnnnnnnnnnnnnnnnnnnnnnnnnnnnnnnnnnnnnnnnnnnnnnnnnnnnnnnnnnnnnnnnnnnnnnnnnnnnnnnnnnnnnnnnnnnnnnnnnnnnnnnnnnnnnnnnnnnnnnnnnnnnnnnnnnnnnnnnnnnnnnnnnnnnnnnnnnnnnnnnnnnnnnnnnnnnnnnnnnnnnnnnnnnnnnnnnnnnnnnnnnnnnnnnnnnnnnnnnnnnnnnnnnnnnnnnnnnnnnnnnnnnnnnnnnnnnnnnnnnnnnnnnnnnnnnnnnnnnnnnnnnnnnnnnnnnnnnnnnnnnnnnnnnnnnnnnnnnnnnnnnnnnnnnnnnnnnnnnnnnnnnnnnnnnnnnnnnnnnnnnnnnnnnnnnnnnnnnnnnnnnnnnnnnnnnnnnnnnnnnnnnnnnnnnnnnnnnnnnnnnnnnnnnnnnnnnnnnnnnnnnnnnnnnnnnnnnnnnnnnnnnnnnnnnnnnnnnnnnnnnnnnnnnnnnnnnnnnnnnnnnnnnnnnnnnnnnnnnnnnnnnnnnnnnnnnnnnnnnnnnnnnnnnnnnnnnnnnnnnnnnnnnnnnnnnnnnnnnnnnnnnnnnnnnnnnnnnnnnnnnnnnnnnnnnnnnnnnnnnnnnnnnnnnnnnnnnnnnnnnnnnnnnnnnnnnnnnnnnnnnnnnnnnnnnnnnnnnnnnnnnnnnnnnnnnnnnnnnnnnnnnnnnnnnnnnnnnnnnnnnnnnnnnnnnnnnnnnnnnnnnnnnnnnnnnnnnnnnnnnnnnnnnnnnnnnnnnnnnnnnnnnnnnnnnnnnnnnnnnnnnnnnnnnnnnnnnnnnnnnnnnnnnnnnnnnnnnnnnnnnnnnnnnnnnnnnnnnnnnnnnnnnnnnnnnnnnnnnnnnnnnnnnnnnnnnnnnnnnnnnnnnnnnnnnnnnnnnnnnnnnnnnnnnnnnnnnnnnnnnnnnnnnnnnnnnnnnnnnnnnnnnnnnnnnnnnnnnnnnnnnnnnnnnnnnnnnnnnnnnnnnnnnnnnnnnnnnnnnnnnnnnnnnnnnnnnnnnnnnnnnnnnnnnnnnnnnnnnnnnnnnnnnnnnnnnnnnnnnnnnnnnnnnnnnnnnnnnnnnnnnnnnnnnnnnnnnnnnnnnnnnnnnnnnnnnnnnnnnnnnnnnnnnnnnnnnnnnnnnnnnnnnnnnnnnnnnnnnnnnnnnnnnnnnnnnnnnnnnnnnnnnnnnnnnnnnnnnnnnnnnnnnnnnnnnnnnnnnnnnnnnnnnnnnnnnnnnnnnnnnnnnnnnnnnnnnnnnnnnnnnnnnnnnnnnnnnnnnnnnnnnnnnnnnnnnnnnnnnnnnnnnnnnnnnnnnnnnnnnnnnnnnnnnnnnnnnnnnnnnnnnnnnnnnnnnnnnnnnnnnnnnnnnnnnnnnnnnnnnnnnnnnnnnnnnnnnnnnnnnnnnnnnnnnnnnnnnnnnnnnnnnnnnnnnnnnnnnnnnnnnnnnnnnnnnnnnnnnnnnnnnnnnnnnnnnnnnnnnnnnnnnnnnnnnnnnnnnnnnnnnnnnnnnnnnnnnnnnnnnnnnnnnnnnnnnnnnnnnnnnnnnnnnnnnnnnnnnnnnnnnnnnnnnnnnnnnnnnnnnnnnnnnnnnnnnnnnnnnnnnnnnnnnnnnnnnnnnnnnnnnnnnnnnnnnnnnnnnnnnnnnnnnnnnnnnnnnnnnnnnnnnnnnnnnnnnnnnnnnnnnnnnnnnnnnnnnnnnnnnnnnnnnnnnnnnnnnnnnnnnnnnnnnnnnnnnnnnnnnnnnnnnnnnnnnnnnnnnnnnnnnnnnnnnnnnnnnnnnnnnnnnnnnnnnnnnnnnnnnnnnnnnnnnnnnnnnnnnnnnnnnnnnnnnnnnnnnnnnnnnnnnnnnnnnnnnnnnnnnnnnnnnnnnnnnnnnnnnnnnnnnnnnnnnnnnnnnnnnnnnnnnnnnnnnnnnnnnnnnnnnnnnnnnnnnnnnnnnnnnnnnnnnnnnnnnnnnnnnnnnnnnnnnnnnnnnnnnnnnnnnnnnnnnnnnnnnnnnnnnnnnnnnnnnnnnnnnnnnnnnnnnnnnnnnnnnnnnnnnnnnnnnnnnnnnnnnnnnnnnnnnnnnnnnnnnnnnnnnnnnnnnnnnnnnnnnnnnnnnnnnnnnnnnnnnnnnnnnnnnnnnnnnnnnnnnnnnnnnnnnnnnnnnnnnnnnnnnnnnnnnnnnnnnnnnnnnnnnnnnnnnnnnnnnnnnnnnnnnnnnnnnnnnnnnnnnnnnnnnnnnnnnnnnnnnnnnnnnnnnnnnnnnnnnnnnnnnnnnnnnnnnnnnnnnnnnnnnnnnnnnnnnnnnnnnnnnnnnnnnnnnnnnnnnnnnnnnnnnnnnnnnnnnnnnnnnnnnnnnnnnnnnnnnnnnnnnnnnnnnnnnnnnnnnnnnnnnnnnnnnnnnnnnnnnnnnnnnnnnnnnnnnnnnnnnnnnnnnnnnnnnnnnnnnnnnnnnnnnnnnnnnnnnnnnnnnnnnnnnnnnnnnnnnnnnnnnnnnnnnnnnnnnnnnnnnnnnnnnnnnnnnnnnnnnnnnnnnnnnnnnnnnnnnnnnnnnnnnnnnnnnnnnnnnnnnnnnnnnnnnnnnnnnnnnnnnnnnnnnnnnnnnnnnnnnnnnnnnnnnnnnnnnnnnnnnnnnnnnnnnnnnnnnnnnnnnnnnnnnnnnnnnnnnnnnnnnnnnnnnnnnnnnnnnnnnnnnnnnnnnnnnnnnnnnnnnnnnnnnnnnnnnnnnnnnnnnnnnnnnnnnnnnnnnnnnnnnnnnnnnnnnnnnnnnnnnnnnnnnnnnnnnnnnnnnnnnnnnnnnnnnnnnnnnnnnnnnnnnnnnnnnnnnnnnnnnnnnnnnnnnnnnnnnnnnnnnnnnnnnnnnnnnnnnnnnnnnnnnnnnnnnnnnnnnnnnnnnnnnnnnnnnnnnnnnnnnnnnnnnnnnnnnnnnnnnnnnnnnnnnnnnnnnnnnnnnnnnnnnnnnnnnnnnnnnnnnnnnnnnnnnnnnnnnnnnnnnnnnnnnnnnnnnnnnnnnnnnnnnnnnnnnnnnnnnnnnnnnnnnnnnnnnnnnnnnnnnnnnnnnnnnnnnnnnnnnnnnnnnnnnnnnnnnnnnnnnnnnnnnnnnnnnnnnnnnnnnnnnnnnnnnnnnnnnnnnnnnnnnnnnnnnnnnnnnnnnnnnnnnnnnnnnnnnnnnnnnnnnnnnnnnnnnnnnnnnnnnnnnnnnnnnnnnnnnnnnnnnnnnnnnnnnnnnnnnnnnnnnnnnnnnnnnnnnnnnnnnnnnnnnnnnnnnnnnnnnnnnnnnnnnnnnnnnnnnnnnnnnnnnnnnnnnnnnnnnnnnnnnnnnnnnnnnnnnnnnnnnnnnnnnnnnnnnnnnnnnnnnnnnnnnnnnnnnnnnnnnnnnnnnnnnnnnnnnnnnnnnnnnnnnnnnnnnnnnnnnnnnnnnnnnnnnnnnnnnnnnnnnnnnnnnnnnnnnnnnnnnnnnnnnnnnnnnnnnnnnnnnnnnnnnnnnnnnnnnnnnnnnnnnnnnnnnnnnnnnnnnnnnnnnnnnnnnnnnnnnnnnnnnnnnnnnnnnnnnnnnnnnnnnnnnnnnnnnnnnnnnnnnnnnnnnnnnnnnnnnnnnnnnnnnnnnnnnnnnnnnnnnnnnnnnnnnnnnnnnnnnnnnnnnnnnnnnnnnnnnnnnnnnnnnnnnnnnnnnnnnnnnnnnnnnnnnnnnnnnnnnnnnnnnnnnnnnnnnnnnnnnnnnnnnnnnnnnnnnnnnnnnnnnnnnnnnnnnnnnnnnnnnnnnnnnnnnnnnnnnnnnnnnnnnnnnnnnnnnnnnnnnnnnnnnnnnnnnnnnnnnnnnnnnnnnnnnnnnnnnnnnnnnnnnnnnnnnnnnnnnnnnnnnnnnnnnnnnnnnnnnnnnnnnnnnnnnnnnnnnnnnnnnnnnnnnnnnnnnnnnnnnnnnnnnnnnnnnnnnnnnnnnnnnnnnnnnnnnnnnnnnnnnnnnnnnnnnnnnnnnnnnnnnnnnnnnnnnnnnnnnnnnnnnnnnnnnnnnnnnnnnnnnnnnnnnnnnnnnnnnnnnnnnnnnnnnnnnnnnnnnnnnnnnnnnnnnnnnnnnnnnnnnnnnnnnnnnnnnnnnnnnnnnnnnnnnnnnnnnnnnnnnnnnnnnnnnnnnnnnnnnnnnnnnnnnnnnnnnnnnnnnnnnnnnnnnnnnnnnnnnnnnnnnnnnnnnnnnnnnnnnnnnnnnnnnnnnnnnnnnnnnnnnnnnnnnnnnnnnnnnnnnnnnnnnnnnnnnnnnnnnnnnnnnnnnnnnnnnnnnnnnnnnnnnnnnnnnnnnnnnnnnnnnnnnnnnnnnnnnnnnnnnnnnnnnnnnnnnnnnnnnnnnnnnnnnnnnnnnnnnnnnnnnnnnnnnnnnnnnnnnnnnnnnnnnnnnnnnnnnnnnnnnnnnnnnnnnnnnnnnnnnnnnnnnnnnnnnnnnnnnnnnnnnnnnnnnnnnnnnnnnnnnnnnnnnnnnnnnnnnnnnnnnnnnnnnnnnnnnnnnnnnnnnnnnnnnnnnnnnnnnnnnnnnnnnnnnnnnnnnnnnnnnnnnnnnnnnnnnnnnnnnnnnnnnnnnnnnnnnnnnnnnnnnnnnnnnnnnnnnnnnnnnnnnnnnnnnnnnnnnnnnnnnnnnnnnnnnnnnnnnnnnnnnnnnnnnnnnnnnnnnnnnnnnnnnnnnnnnnnnnnnnnnnnnnnnnnnnnnnnnnnnnnnnnnnnnnnnnnnnnnnnnnnnnnnnnnnnnnnnnnnnnnnnnnnnnnnnnnnnnnnnnnnnnnnnnnnnnnnnnnnnnnnnnnnnnnnnnnnnnnnnnnnnnnnnnnnnnnnnnnnnnnnnnnnnnnnnnnnnnnnnnnnnnnnnnnnnnnnnnnnnnnnnnnnnnnnnnnnnnnnnnnnnnnnnnnnnnnnnnnnnnnnnnnnnnnnnnnnnnnnnnnnnnnnnnnnnnnnnnnnnnnnnnnnnnnnnnnnnnnnnnnnnnnnnnnnnnnnnnnnnnnnnnnnnnnnnnnnnnnnnnnnnnnnnnnnnnnnnnnnnnnnnnnnnnnnnnnnnnnnnnnnnnnnnnnnnnnnnnnnnnnnnnnnnnnnnnnnnnnnnnnnnnnnnnnnnnnnnnnnnnnnnnnnnnnnnnnnnnnnnnnnnnnnnnnnnnnnnnnnnnnnnnnnnnnnnnnnnnnnnnnnnnnnnnnnnnnnnnnnnnnnnnnnnnnnnnnnnnnnnnnnnnnnnnnnnnnnnnnnnnnnnnnnnnnnnnnnnnnnnnnnnnnnnnnnnnnnnnnnnnnnnnnnnnnnnnnnnnnnnnnnnnnnnnnnnnnnnnnnnnnnnnnnnnnnnnnnnnnnnnnnnnnnnnnnnnnnnnnnnnnnnnnnnnnnnnnnnnnnnnnnnnnnnnnnnnnnnnnnnnnnnnnnnnnnnnnnnnnnnnnnnnnnnnnnnnnnnnnnnnnnnnnnnnnnnnnnnnnnnnnnnnnnnnnnnnnnnnnnnnnnnnnnnnnnnnnnnnnnnnnnnnnnnnnnnnnnnnnnnnnnnnnnnnnnnnnnnnnnnnnnnnnnnnnnnnnnnnnnnnnnnnnnnnnnnnnnnnnnnnnnnnnnnnnnnnnnnnnnnnnnnnnnnnnnnnnnnnnnnnnnnnnnnnnnnnnnnnnnnnnnnnnnnnnnnnnnnnnnnnnnnnnnnnnnnnnnnnnnnnnnnnnnnnnnnnnnnnnnnnnnnnnnnnnnnnnnnnnnnnnnnnnnnnnnnnnnnnnnnnnnnnnnnnnnnnnnnnnnnnnnnnnnnnnnnnnnnnnnnnnnnnnnnnnnnnnnnnnnnnnnnnnnnnnnnnnnnnnnnnnnnnnnnnnnnnnnnnnnnnnnnnnnnnnnnnnnnnnnnnnnnnnnnnnnnnnnnnnnnnnnnnnnnnnnnnnnnnnnnnnnnnnnnnnnnnnnnnnnnnnnnnnnnnnnnnnnnnnnnnnnnnnnnnnnnnnnnnnnnnnnnnnnnnnnnnnnnnnnnnnnnnnnnnnnnnnnnnnnnnnnnnnnnnnnnnnnnnnnnnnnnnnnnnnnnnnnnnnnnnnnnnnnnnnnnnnnnnnnnnnnnnnnnnnnnnnnnnnnnnnnnnnnnnnnnnnnnnnnnnnnnnnnnnnnnnnnnnnnnnnnnnnnnnnnnnnnnnnnnnnnnnnnnnnnnnnnnnnnnnnnnnnnnnnnnnnnnnnnnnnnnnnnnnnnnnnnnnnnnnnnnnnnnnnnnnnnnnnnnnnnnnnnnnnnnnnnnnnnnnnnnnnnnnnnnnnnnnnnnnnnnnnnnnnnnnnnnnnnnnnnnnnnnnnnnnnnnnnnnnnnnnnnnnnnnnnnnnnnnnnnnnnnnnnnnnnnnnnnnnnnnnnnnnnnnnnnnnnnnnnnnnnnnnnnnnnnnnnnnnnnnnnnnnnnnnnnnnnnnnnnnnnnnnnnnnnnnnnnnnnnnnnnnnnnnnnnnnnnnnnnnnnnnnnnnnnnnnnnnnnnnnnnnnnnnnnnnnnnnnnnnnnnnnnnnnnnnnnnnnnnnnnnnnnnnnnnnnnnnnnnnnnnnnnnnnnnnnnnnnnnnnnnnnnnnnnnnnnnnnnnnnnnnnnnnnnnnnnnnnnnnnnnnnnnnnnnnnnnnnnnnnnnnnnnnnnnnnnnnnnnnnnnnnnnnnnnnnnnnnnnnnnnnnnnnnnnnnnnnnnnnnnnnnnnnnnnnnnnnnnnnnnnnnnnnnnnnnnnnnnnnnnnnnnnnnnnnnnnnnnnnnnnnnnnnnnnnnnnnnnnnnnnnnnnnnnnnnnnnnnnnnnnnnnnnnnnnnnnnnnnnnnnnnnnnnnnnnnnnnnnnnnnnnnnnnnnnnnnnnnnnnnnnnnnnnnnnnnnnnnnnnnnnnnnnnnnnnnnnnnnnnnnnnnnnnnnnnnnnnnnnnnnnnnnnnnnnnnnnnnnnnnnnnnnnnnnnnnnnnnnnnnnnnnnnnnnnnnnnnnnnnnnnnnnnnnnnnnnnnnnnnnnnnnnnnnnnnnnnnnnnnnnnnnnnnnnnnnnnnnnnnnnnnnnnnnnnnnnnnnnnnnnnnnnnnnnnnnnnnnnnnnnnnnnnnnnnnnnnnnnnnnnnnnnnnnnnnnnnnnnnnnnnnnnnnnnnnnnnnnnnnnnnnnnnnnnnnnnnnnnnnnnnnnnnnnnnnnnnnnnnnnnnnnnnnnnnnnnnnnnnnnnnnnnnnnnnnnnnnnnnnnnnnnnnnnnnnnnnnnnnnnnnnnnnnnnnnnnnnnnnnnnnnnnnnnnnnnnnnnnnnnnnnnnnnnnnnnnnnnnnnnnnnnnnnnnnnnnnnnnnnnnnnnnnnnnnnnnnnnnnnnnnnnnnnnnnnnnnnnnnnnnnnnnnnnnnnnnnnnnnnnnnnnnnnnnnnnnnnnnnnnnnnnnnnnnnnnnnnnnnnnnnnnnnnnnnnnnnnnnnnnnnnnnnnnnnnnnnnnnnnnnnnnnnnnnnnnnnnnnnnnnnnnnnnnnnnnnnnnnnnnnnnnnnnnnnnnnnnnnnnnnnnnnnnnnnnnnnnnnnnnnnnnnnnnnnnnnnnnnnnnnnnnnnnnnnnnnnnnnnnnnnnnnnnnnnnnnnnnnnnnnnnnnnnnnnnnnnnnnnnnnnnnnnnnnnnnnnnnnnnnnnnnnnnnnnnnnnnnnnnnnnnnnnnnnnnnnnnnnnnnnnnnnnnnnnnnnnnnnnnnnnnnnnnnnnnnnnnnnnnnnnnnnnnnnnnnnnnnnnnnnnnnnnnnnnnnnnnnnnnnnnnnnnnnnnnnnnnnnnnnnnnnnnnnnnnnnnnnnnnnnnnnnnnnnnnnnnnnnnnnnnnnnnnnnnnnnnnnnnnnnnnnnnnnnnnnnnnnnnnnnnnnnnnnnnnnnnnnnnnnnnnnnnnnnnnnnnnnnnnnnnnnnnnnnnnnnnnnnnnnnnnnnnnnnnnnnnnnnnnnnnnnnnnnnnnnnnnnnnnnnnnnnnnnnnnnnnnnnnnnnnnnnnnnnnnnnnnnnnnnnnnnnnnnnnnnnnnnnnnnnnnnnnnnnnnnnnnnnnnnnnnnnnnnnnnnnnnnnnnnnnnnnnnnnnnnnnnnnnnnnnnnnnnnnnnnnnnnnnnnnnnnnnnnnnnnnnnnnnnnnnnnnnnnnnnnnnnnnnnnnnnnnnnnnnnnnnnnnnnnnnnnnnnnnnnnnnnnnnnnnnnnnnnnnnnnnnnnnnnnnnnnnnnnnnnnnnnnnnnnnnnnnnnnnnnnnnnnnnnnnnnnnnncgggtccgccgacagaggtcctccttgcactctgccggcccgtggatcttggttcattcagcagcgtcgtcgtcgatcccaattccgatgacgcttgatccccttgttccttcttcactcaaacttcttcttgggactcacggtgaaatcccgagtcaccagaagatccgggcacgcgcaccattgtggcgtagtgggatcagcaaaacctgcgaggttgccaatccaacttaccaactgcgcccgaacaccgacttacggagggggtcccccgatgatccgtgatctgtgtgctgaactggtcaccttgtgtacccgtcggtagggctggatctgctcctctggtgtctgctgaagcgtccgagccttgaagtcagaacagtctggtcgagacgcggggatgtgggtggagcagcgcggaaatcttcactctgcccgcagtagttactcccaatccagtggtagtcgacttggatccggcggcctggatttggatccggccgtggggttgcctttgggttgttgttgttcctttcctttgccttcgcaggtcttcctttgccgtacttgccgcttcctatatagatgctgagagtcgaggatgccaatgtattatccagtcttaaccaacgctagctccactaccagaaccttgctaagccgtggggccaatgtacttcccgtttccaggcgaagccacttgcgatgtataaggcagattcgagtctgatttatgcttaagtccaatcccatcccaaagtcctatcttcctatggatcctatcatcccatctgcacctactgactctatggggcttgattaccttccttgcgtgtcgcttgattgcctccgtcgagccataattttagatccaccgctcacttccatctgagtccgaatcagaatcagatctggattggatcggatcgcccatccacttgacagctgcatctcttggatcttgggtctcgaggcatggcgttgcttgggcacacattcgtgacgtccggtcgcactcgtagtgccttccgttgcaatctctaacacctggtacggggcccgatccgccagtctggtgggtccatcgcggagtctggatccatcattctgccgatcaccctttgtcccaatttcttggatcctgcttctccacaagtatatagcatccaagcttgactcgatcgaccaccagtgtaagccataatttgtgtattcgacttgctgttatcctccgactcgggagctcgcatcatcttaatcgaaccagagctcttcgtccatcgtcccacgaagccaatattcttcgacttcttgccctttttttttggctgcttgtcctcatcactgctgtccgaggcatcttcttggcgtttccgctttcggtcgtccagctcagcgaggcgtttgcggcaatttgcccaaagatgtccaaccttgtggcaataattgcattctcgcgtctccttcttaccattgtcgtttttacggcgctgctttcccttctaaggtttcttgaatttcacagctccgatcaacttttcaccttcctcaaatttccgcttgacacctccactctgctctgctacctccctcttcatctctgcttccgtccgcaaagtgttgaacacgcgctcgaggtcaggagggctgtccgattgcctgaacatcctgataacattccgatgagtttcttctacactggtcaggataattctcgccatttcatcgtcactaatcggcgaattcatgttttcaagctggcgtcggtagtcttcgagactctccaaatatttatccatgttcgtgccttttgtatattttgctccaaacaactttgcccgaactcggatgctgttggcaaaatcacgttttgtcttctctctttcgaaggcagtccacatttcacacacgcgcgtcatcttacagacctcttagcatcttttgacagaagtccgtagagtagagcatctcgcgcgaacaaattgcgctcttcaaaaatctgctggcgctactcatcctgcgaatcgggtacttcagtcccgagaaccacgttccagcaatcacgctggcgcaggaggactctagatgagctttgtacaggtcaaacccgccgtcggcatcgaatttaggtgatttagccgtttcagaagccttcctcaccgctggttgtcgagcaacattgcgtccttggccgtgtggttgctgctcctgccgcgctgcagcttgcccttgctgttggggagcttgttgttgctgcaggtgatcttgtccttggtgttggggtacttgttgtccttatgctgggggctgctggtcctgtccgaggggctgcaggccttgaagaatgcgttgaagctccatacttggtgtcgtgcactactcgaatccacagtagccacttgggcgcataacctaagagaatcgttgccacaactctgagcactttgccggtgtggatgagttgtgtcgagttacgcgaagcagttgtgtgcgaagggctagccgagtacaggaatgaaagtgagtacttcagtgtaaaattggttgtgattcttgttgtttaagtgttgttgtaggcgaaagcttctcaagcggtaaccccccccccccccccgttgactctatccgactactatgggcgcagccataagagtacagcacgcatgctgtcgctcgtaactctcgaggcacaagctagtctctctcgcagtcaatgccttcaaccgtcactcgctactcgtagacatttaacaagtattctactatacatcttcatacattgttgttgcaacccaagtgacacggattgatctcagtcgaatctcttactaacgaacagacgacaacctacgacaatcatcttatacatactttaatcaagataaaaattgtccgaaaactttgtcgcggtccggaatcgtgtcagttgtatactagcctatctacgcgctcagaaatctaggtccgcgtcacatgccagctatagattgatcggataggtacaacacatctaaatagcgagctctaactctttctagaagctgagatatggatgaatatagtggtctttccgactgataagcgagcaggattgtttcaggcttgtcttcacctgaattacagcctatcatatcgcctggtgtggatatttagccaatcgtctgcattagggttaggtgaacccgttccggcactttccgataaatttttgtcggaagactggcctaaatatgtatatgcatatacaaaaatcaagtacagaaaatactttttaaatagttttgccgttctgacaactaggattatgtcctagaataggacggagtgaagttttgattggtgttcatttcaagatggcgatcaagtccgagagatgaagcccccacatgcacgcagtcgcggcgaagggcaaggcaagatgaccatgacggcgagcgcgttgagcgttccaccgccacaacgctagctctacagccgtcgacgtggcgtcacacgcagccgttggaggacgggtgagcttgctgcagtacgccgaggttggctgaggtggtactgcgcgggggcagctacgcgagtgcagaggagacggtgagcgagatgatcaagcgcaggaaggagctgcagaaagctttcgcggctggcgacgtggcgaagctcatgggcgcgcgccgccgcatggagggtcacgaacgcggtcacacccgcggaggaccgcgaggctccttgccaagggcacgcacggagcaacagtgcatcgctgctgtccgcccatgatctgtaccttggagctggacacgccggcgctgcagctgtctgtgctcgttcgagcagggggatgttgagggcatgctccgcgtcatggacgacctcctcgtgatcacccagacgctggacccgctgtcgcacaagttcctgccgcacaaggctaacgatctgaacgagaagctgtcgaaggaggtgaaggtgatgaaggcgacggtaacgtcgtgcgtgcccggccggctaggctgcaggaggtgaaccctatctgcacggctgccgtgtgggcactgtacatcacggaggtggccaaggaggacagctcggtcacctgtacatcatgaccccgctactcgaatcgttcaaggtgctgcaccagtaggtcaagctggtgaagtctctgccgcgcaggatcggattgccaataatggcagactacaaggtggaagtggcgatcgcggtgctgcgtgcctcaaagctggcgcattagctgaggaggcggtgatcgtagattggtgatcaaggtgatcaataatatatgtatctacccttgcactttatcatcgcctaacttttattgcatggtgatcaaggtgatcaataatatatgtagctacccttgcactgtatcatcacctaacttttattgcatgtagatgcaagtaccctgccattttcttcttcagttacctttttttactgacggtaactttagtttggtcaataaatcctagatggcggaatatgtgagtgtccgaaagattatgtcgcgtacactggggcaataatttgttgcattcttacaggtgaacggaagcatgcaattcgaatctacccttgagttggttgcctacatactaagagcgccgaggggtcacatttgtgtctacatgatgcactctagtgtagaatgccttgaactcgtctgagaccgttttctgcaggtaggtcgccttattcagctccgtctcatctagcttgaatatctgggtaaggacgctaatgttgtcgtatccatcattatcccacttcttgaactgcgcagtctgcaacttctccgctcttgatcttacatgcgtgctttgaaccgtcttacccatcaccaaactgatggccaagtcaccgtcgccaaggtgtttcgtcagagtctgcagcaacgtgatccggctagacgtcttgatgttgacgagcttgatatactcgttcaacgtatccaactttcggctggcaatggtcagcgtcgggttttcctttagcttcagcacgttgacgaaaacgtcgtcaatggacttttcactgtcccaccagccctgcaattgtttagtctgcagccgcgtcgctgtttcccgcgtgttcgggtctctcattgcagtcaccagcgccctcgacatcttttcatctccatagtgattcgtgagcgtactaagcaacgacgttttcatgttcggattcttcttgttgaaggctgtaatgaagttgtccagcgcccacaggttattgctcatgagagcattcgtcgcgtcaccattcagctttagctcttccaagacatgttcaggctgcagctttctcccaatccagtgcttgatcatttgatcctccaactgcacggccttctgttgcgtacgaaagtccgtctttgcccgttggaggatcgacgccagttgactgtctccgccaaaacccgtcttcaacgccgagtacagcgacacctgtctgcctgtcttactgttgaacgccttgatgtattcctcaaacacctccaacttccggctagtcagagcttcgtacccatccgctcgcaacttcagtagcttgaacacatcgtccacggatttgctgtccagccaatcgttgatttgctgcttgcgcaaatttaccataaggtccctcgtagcagcgtcattctttctctggacagtcacgagtgcccgtgccacagcatcgtctccatagcgcgctgagagcgtaccgaccaccgagagcttgtttttcgagttcatgctgttgtgcaactcgatgtacgtggcgaaagtgttgatcttcgggttctccagcgtcgccacgatgtcgtctccgaactttagcttgtccataacttggcccacattcatgcgccgagcccagtaagagctcgccttcgcaagttttgacacgctctccttagccagaccagcaaccttgtccatgccggccctatcttcgtcgccgtcatcataacccctcaccattctcttcggagttatgaagtcgtcagtgctcgagtgcatggcagcggggagctggagtgctgatacggtagctgccgagacattgggcacgattgccaggaaggcagcagtagccaacagcgcgaagctggagagacgcatcgtaggtgggggacttggacgctgcgagttgagggcaaaattgcgaagtgctttgaaacagagcggcctcccgagggaccgtacattcaatgtttgcgatcgatcacctgatgcatgtaactgtatgctttcctccggaccatacgccagaactgggtcccaagatcgtttgcgatcgatcacctgatgcatgtaactgtatgctttcctccggaccatacgccagaactgggtcccaagattatggcaggtctccgttttattgccacccgatcccaacttggatcttaccggtattaataccatggtctgtaccgactattactgtccacctgttgggccatgtgattaccgtctacataccacgcgatgtcccataaggctctgtacaaagaagtgattcacggctgtggacatacaggcgtccccgggctagtcccggctgtatgaatatttatcaaaagtcaccacaaacaggtgaggttgtatcaaaagtcaccacaaaggtaatgattggctattaatcagatcactttacaatcgacggaccgctagccagcatcgcctccatacccagctctcatgcgctagccagaatcgtgccgcaccctgcatcattgcctggctcaacggcgtgcccgaggacagcgccgtctccgtgtccaccaccagatccaggctcagcgtctgcccgccaccagtgtcgtctccgtgtccagcgccgtctccgtgtccagcgccgtctccgagcccattgtcgtctccgtgcccatggacgtctccgtgcccatggacgtctccgtgaccatggacgtctccgtgcccagtgtcgtctccaagcccagtgtcgtctccaagcccagtgtcgtctccgagcccagcccaagcaacagcttcgtggccgagaccatcgctgtccccgtggtcgacaccagacccttttggataatccggcacagtgttgacttacggttgtccatattaatgttatccaccgtttccaaagctttcgaaacccggacaagagacgtactatgtccatcaaccattgcactttgaaatccacgtgaccgtgctatctgcgcactgcttgcgtttttagtagatcggcaggtttgggcatgaccaatggggacactgctaatataccatgcatcggtaggtacgtgactgaacttcgaattcatgaccggatctccattttcatctcgttcctgatctcgtttttgagtaaggcagacctcccacatagtacaaccagtacacagccacttaatgtagaaaccccacgactcctgtcgaattttcttgttttcgttgaaagctctcgttttccagaacttggtgctcgtcttcctatcgacaaaataatttccaacttttatcatgtcctcattgctggattcagcggcagtcaaagcgacgaaagacgaatccatggagacaaagtttgcttggaagcggatgtgtgaggtgggcagtcttgctaactgggtgggcagtcttgctaactgggtacgcttgaaagtgaaggcctcgacaagttagtctatttaaatacgagctgaaatgaagaacgcgttctgatctattttgtttcatgtcttatctaagataatgaggccgaggttacctgcagcctaggacgggagctggtgctgccaccaacacgaccatgggcacggagacgacactgggcacggagatggcgctggacacggagacggcacggagatggcgctagccacggtgacggcacggagatggcgctagccacggagacggcgctggccaccaacactacactaggctcggagacgacactgggctcggagacgacactgggctcggagacgacactgggctcggagacgacactgggctcggagacgacactgggctcggagacgacactgggcacggagacgacactgggcacggagacgatactggcatgggcacggagacggcgctgtcctcgggcacgccgttgagccaggcaatgatgcagggcgcggcacgattctggctagcgcatgagagctgggtatggatgaatatagtagtttttccgacagatagcgtagtaggattgtacagaacaggaaatatatgacggcctgaccaatcacacagtcgctattcacaattttcatccaatcaaatcacgcagggataggtttttagttccgacagcttctgacaaatatttgtcggaagcgagacgcaaatatgtatatgcacatagtgaaatacagtcaagtacgtacttttcaaatatgctcatgattacaacaactaggcagaaacctattttaggaccggagctctagtcagtggagacactggtggtcctccgcatatacacacataggcactttgaaacggcagaagcgccagacaaagatcagcatgagtctctctgcactcatccctgcgaacacgcaaaaagcgtgcaccacagggattggtgcttttgagcgcatgctagaagcagagaatgtgtctatgaatgtcattcaagcctgtgtgcgtggtgacagttctggcaagagccttgctgccattatggaccgctttggctactacctcgccacgtatgaaggtaagaaaggtaagttggcgtctaacacagccatttcatactttagaaacgttaagctttggtttttcgatgagcatcctcatcttcgggttcctacagagttaacctgctaaagcaaggcaagactttggaaaaacattgctttaaacgggacaatgggggatttactaacaaagctccgccttgcacgaaggcggatttaaggtcactaattcgctatgtctacagcacggcgtctgtcgccaccgactacgaagatgcggcgctcgcgtgcctcatgtggcactgttttgggcgctcctcggatctcggctatatcagcaagcagcacatcacagtgtcagcagacaacgttttctacgtacgcatgcttcgcgtgaaaactgccgaagatcaagactacctgaccgcgacgacttcctcacctgccccctgcacacactggccgttgctctggtgatgcaggaggcgccctgtgtgtcgctgctgagtcagcttcccgctctcgccaccaccgctggaacctcgctcgacgcaggtgcgcctctgctcgaggtgctgcgggtcagcgtcgcggatagcagcgacaccgcgacggccttggaagcatccctgtcgccgcccagcaccgcttccctgctccccacaccaagtcctcccagctccaacccgtcgcaagccaccaccgcctccctgccagctcagctcacagcttcatgtcccgcgaggagcagcctcggccgcggtgaggacggagtccaagcgtatgtcaaccgctttttgaagcgggtggctgaacccgccggtgccacgagcaacctgacctcgcactcctttcgccgaggaggtgcccagcacgccaacggagacgagcggctagcagcgcagtggatctttgaccgcgggccatgggatatgacccgcacgaacaaaggctttgcctatgtcttcaacacccacccacccctccgcgaagaccgaaaagtcgcccgagtgctgagcggctggagcgccgacgaagccccggtcattgcggacgttacagcgctggaccatgggacgcaggaacgcctggcgcgcttggaggagctgctgttcggttcctgcattggactggcagacgcaaagctaaacgtaagtcgcaaggttatcggagtgctgacggcgtacctgatcacgtatttcccgcaagtgaaggcgctggtgcccgacacgctgttcgttgcgcgtatcgaggaatgcttgggagcggctgatatcccggtcgccgacatgctgtcttggtccatggcaatcaatacgtttgctgcttcgagtcctgaacaagcacacgaaaagtcggcagcaaagagcaactgctgtcatgctgggtgtcaccatttggctgtcattagcgagcatatcgagagcaatcggctcatgtttgcgcgcctcctcgcactggagacgatcatgctaaagcaagcgccgcctgtgaagcgtattgaagaagcatcagaagagcaagcgtcgtcagagcaagcgccacccgcaaagcgaagaaagaaagctgctacgaacctgtcctcgctgtggttcgagtggtacacgaggctgccccgtgtctgggactcgagcgaccgccagaagaagtccgactaccgcctgggcgttgcgtacatgaagctctttcttgacggcggattcgtgctgcgcgaggatgctgtcgacttcaaagatctagtcttcgacgtaggaaaacgcgcggaagcagcggtccttaggttcttgagcgagcagggatcccgagcaaaaggagctggcagcgtgctgcgcgagatacgcaagcttcatcggtctggtgccctcgacagtcgcatcgtggcgtatcaaagccacatcgccctggaaaggatcgtcgacccagcgccggctgcaacccaaaacatactacaagtcgtcggacacgtgtaaggcacaaagttcggggcaaatacatatattcatgaacaaatacaagacagttagcttacgaacgcgcagatcaaggccatgaccatcctgccaaccatcgtccagagaccatcgggcactcagcgcatcgctctccatccgctcgtggccgcttgcccggacccaaacactgcacaccttggaaggctcccatcaatcgtgattggcgacggcgggcttcgatcccgctcctcagggcaagccctgcgctcatccattgagcttcgtcgtcgagggtggagcctccggcttggcttgcggtctggggggttcggcttaaaaaatctagactgaagtcgcggggcctctgtcggcgttgtctccgagagcttgactgcgtggcgcttttctattggcttaaataaaacctcattgaagtttttaaacgagtggctctggaagagagggtcactcttgtgaagtgtaaatatcactgtttaaagacaatcaacccaaatagtggacccaccacaggatcctggctctcattaatgaacttgccacctcgagagcacattgccccgagtcgattttgcgcctagatgcaaattgccgtttttctcggcccacaggcctctagaggcgatttcctcgcggctgtgagcaccgcatgaaagctgacaagaatcggtcaaacggccctagtcctaatttaccgtacataatatctaatttccgattttttactatttccgattttgcactggctttgaccaattgcctacttgtcggaatatgtagggaagtcggaaccgttatgatatgtcgtattatacgacattgagactcggcaaagtcgtaacttacgacgtcgggaatcaaggggttaattgtaatgtttaagctaatatttgccggaatcgggtacccgtcgataaatgctaagatttatgcacattatttaccaaaggttgatactaatcgtttattatttaccaaaacctgcattcaaaaacttacggacgctccagtgcactatgagagcgtcatggcttcgctgaaggcgtatcaatttgcgccataatcgactaagcttagctgaagatgaccaacatgacttgactaggtgcaggctgcatttttttacatgtcaatttgctcaatacccaattactcttagccgaagatgcccaacctcgtgtctgtcgccaaaccaatcagctcaactcgacagtgacacgagcatcgttcgtttgaataagcctttttcccctccgttgaagcacccacctccaaggaattggcccattagcgtatttctcattccgcaatttatcccccaagccctcaagttaaaagtttgtttgtttcgtttttgaattgaggatcattattgtcacttagctaacatcctcaagttaaaaggtcaagatcagcgcaccatgcgtctctacttcgtcccgctacagtactgtagctctctcgtctgatcgttagcacacaacatagttcgaaaatgagcacggcataccttacctgcaaaatgaatgaaatagctctctcgttgctaacgccaacgcagccattggaccagggtgctatgtcaccgatggcctcatcagacgaggcaacctcaattggtgactttcggttcctgagaacccaccacgataaagaagagcggggcttgctggttaccagcctcacaaaggtttggctgaaacatcatttccgtatcgatacacttcgatgtgcgcaactatttgttcaattccgcagtctcgggcagatgctgcggctgcgaagcaggcgcagtagatgcccacgttagagtcaactaaagagttgggctggtagtgcttttaaggattaaaaacaaaacaactttaggatttactcaattattatccattatcatcgtccatgaaactattcgtcgacctgtgtaccctcccggagcaacgctccgggttgcctatatttaatgctgtatctgaaggatcttgttagtcggcactttccgcaattgtttgaacacctccgcttctcactccccgctcagcgtttctcgaccacagtcattgcataatggctacaccggttctgcttattgccctcagtcatgttgttcccacttcttttcactccaccccataggccatgccatcccctggacagctactcatcagaatctctcgttgctgtcttcgttgcctagctaaacgctgtctggggccgccttcttaccacttacatgaagaagacgaactaaacatcagttgccaagccgacttagtgtctgaagtcgcactctattctctatgtagtagttatgtctattggtgcttcttgtcatgaagacgttggccaccaacttcggtagcgggtgtcaggtcacggacaaacgcacgcgccaacagaaacagcagcgggatgaagacgatctgcgcgttcacgataccgaacatggaaatggagttgccaatctccttccagctgccttcgttcttgaccaggaagaggaaatgcaacgcgagcacgtccgacattgctacaacaaggaggaagtagcgggtcgcgggtaaacgaggcttctgtgagtcagctgacgatatggccgaaggaagaagcaggatcaggtggaaggtgcacgccaccaccatgaacggaatgaggatcttgcccaccaacagcgcgcccatcgtgaagggggcgaacaccgtgacgaagcggtaggtggacgaaatctcaaagctgctcatgctggccacgttgcccgtgccgaagaaggcgatgttgaccagcagtaaaaacacaaacgcgcgctgaacttcccgccacatcgaagacgaagacgccagagaggcttcggcttccagcaacaaccagctcacgagaacaccacatagcaccacgtagaacagcacctcgtaggcgatgctcaatagaataaatgacggcgcgaaggctagcatcacttcaatgagccgcttcacatagccttcaacctcagcttgaagaagttggcgatcacgacgaccagcaccagtttcaagaccacgggttaggctgcttctggtgtggtgcaacctcgcgagcaataccacgatgggggcaccagccagcaaccagttagctaccgtgagtaaaaagggaggcttcgttcgatcaccatccaaatactgcatagtcgcatgcaacgtcacaagcgagagtaccagcggcaaggcgctcaggatgaaagaagtgttcgtccagatcttttgcgcgcgagaacccgccacgctgagtacagccccactaaagagcaatgtaagcagaccaccgacattcacgagcgcagtgtgctccccatactcgctaggcaagtatggaaacaccgagatcaggagacagtttatcttccaactgcgactcggagccgggaaacctccagtttgagcatgcgtacttccctcttcatctcctgtcgaagtgccaacatacggccacagcgctagaagcgagaacagcacaccgaaaatctcgcgtcgttcatacccaaataccacaagctccagacacacgaaaattagggcaatctcggcccatcgcttccaactggacttcgtttttgtttcgctcgagctcgaaccggcccaggctaccttgatcaggccagcatggttccacgtgaatactccaaacagcagtggaaacagcacgtacaagtagtacgtcgctggcgagccctcaagggcgaggtacacgaaggtcgcaaacaccgcaacgacaagcttcatgtccaactgcttgccgcccaccccaagcagccacttcaagctgaagtctcttgggtgtatgtaggctactccgacgacaatcatccatccaacatagcccaagacaacaacgctgagcaggaagaaccagtcgtacctctggaagtattccagagtcgccaagcagatgtcaatcagttcctgacttagttcttccacgcgtgcgaacgcttccgagtattcgtcactccgaagactcgtatcatacgcttcagcaagctgcttcgacagctcagggacgcgatcatggaacggaccgtacggcacaaatctcagcaaagttcgcgaccgcttctcctgctccttccgcagcgcctgaaggtacagttgctgtgcgttcgagcgtacagcattcgctcgatacgccccctttgccaagtacgagaacggcagcactcccacagagttccgcggatacggcaaccccagcaacgcgctgatcaacggagcaacatcagcctgcatcacgtccttgcgcagcaacttgttgagcgctccccactcgtccaccgccgcttgttcctgctcctcctgggcttgaagctgcgcttggacctgcgcgcgcgactgcgtgggcagatcaatctcaaactcctcactcttctgcacttcggtaggtccctgcacgcccgctccccacacaaccagcggcgtgcgggtattggcggggtctccgtctccatgagctcctttcagccccattccatggtccgccgtgaacacgtaggccgtgcgtccgtcataaccgtagaactcctccaccatccgatacgtcttctccaccagctcgtccaccagcgcgatattgttcaaatagtccttggaattgggtcgatgggcgtgtccattggagtcgatgcccagataatggcagaacaccacgaccccttcctcatttaacttctcagacagcttcgagtcctctttagccacgtccagcagcctctgcaggtggcggaacacccacacgtccaactcggacgagtctcccttggcgaagtcctcctcctcgtgcgagtagtgctcttcaagtgcttgtgacacatggcgagcaaacatcggcacgatgtccgggctgccgaacaggaaggcgctgctgctctggttgaagaccgagtcgaagtccacggggttgtcagcccagcccttggtcacggcgctcacgtcctcgtacatgccggcgaagagcgccacgtggcccggacggctctcggtgggcacgcgcgtgtgcgagacgccgtagctgccgcgagtctcgatgatgttgcgtaggaaggaggcgcgtggtcccgcgcgcgcgtcggcgcgtgccgtcttggcctcgaaaaacttgtctgctctacaaccgtcggctacgaagacgatcacgcgcttggccggcggcgcgtccgtgtaggccacgctctcgacgtgcggtaccacgggggacgtgaagtagatgtcgaagatgctcagcacgtacagcgcgtggaaggtcacgcccagcaccagcagccgcgccaggccggagcccactttgcgcaacgtcatgacgctcttggagatatgaagtgaagtgagggagaagatacacttgtcgtttgtatgtggaaaagtgctattgtaactgtagatgctctacaactgcgtgatatgttaatttgagttatttagagcggttacatgtgtatggtatagtgacgaatacaaagggcaagtgacctttttttcgttattgttgcaatatgccgcagatgggcgggagcatccgcgaggaggtggaggtggcgctgcacgagcaccgcttcctcgtgaccaagctgctggagtccctcaacacagcctcactgtacgtgcaccctatctctaatcccaccgctgcgtggctccaatccgaagtatttctcatgtaatctagcgccttataacatgtgctcttcaactgtatgctatgcaggccgccgtccacgatcaccgccacgaggctgcgcaccgtgaacgagacgttcaacaaggtgctggaaaaggaccgggacctgctggcggccgtcaagaagcgtgcgttgggctaaaggccttggtattgacgagataggagtgctctattgacactgagagctgttgacacttgacgcagtggccaggcaccaggtggcgcagaaggagctgctgcgcgtggaggcggagatcgagagcaagaagcagaaggtcgtgcagtatgcagcgcagctgcggcgctcccaggaggacatcgccaatgtgctgaggaaacaccgcgtcgtgctgcagaacgccaagcagaagtccaaaggtagagcttggcttagcttgacttcaaggaggagatgcgtactgatctatgtctgtgtggcgttgtagtggttctcgacccgcgcgacattgtggcgtacgcgcaccgcattgccggcacgacgtcggcacccaaggagtggcagcccggagtacgtgggctgatctccccaatagcgtccttttgtggaggtcacgcgcgactttgctgacactttatttctctgtgttttctggttgtggtcagttccccatgtttgggttcatgccgccggcgccgcaggagcacatgatgcgtgcgggtgtgctcagtcgcggcatcgtggcggagatcgtgacccaagggccggagaagtacacgtccacagcggcgcgtgtcaagcaggacggcgacggtggcgaggccatcgagaagctcaacatccccattggcttgggcgccagcgacgcgcagatccgcaagcagatgccgccaggatggaagcccggcgaccccgtggacctgccgctagacgcgctgctgcactacatgggccggagtttcttcacggagcacggcatcacgctgcccgagtcgtggaagactggagacccgctgccgcccgacgtgatggagatcctgcgcaagaagttcaagctgccggagaagcgtgcaccactgtacgacgacgaggtcgtggacgacgtggaaggtctccgcaagaagcgcaagctggaagaaggcgacaaggccgaggacggtgccgccgacagcgacagctcgagcgactcgagcgacagcgacgaggaggcccccaacaccatctcgctcagcctctcgtcgtccgaagacgagagcgacgacgacagcgactagagcccttgctaaaatggctacacttgcacgtcatatggtcatatggctacatgtatatcgccgatcttttggatcttttgcgaaataccggactcgcacgcgtaaacatatcgagagcctgaaattagatccaagagcggtgggggtatctcgtgtgtagtgttctgcaagtagagctctactgcagcactgtgggtttatcctcagctcagctcagctcagtctaaaggcgtcaagcctcgcttttcttagctgcacgtcgcgcctgccgacttctggtcactggcccctcccacagttcactacgtgcacgccggttcacctttgatcgctttaggccgcgcccgtcggctataattactgcgactaactcactcgcctccagctctggcccgttactccagactccaggctcagtctcgattcactccggcatttgcagcgtcccagtcgcagtcgcctgcctccttcctccttcacctctagctcgagcttttcgaccaacaccatggccacccgagcagtgcagaagacgggctcgaccgtgaagctccgccagcaggaggccacggccgccaatgtggcgtcgcccaagggcatctccatcaagacgccgggcaagatcccggccgccgcgaagggaggtgaccactcgctcgggctgcagcgccgtcggctgtccgtggtgagcgacaacaagctcgtggacggcatggctgcagccacgatcgaggaagtggacagcagcgcccaggcgctggcggacgggagctgcgccgtcgtggccttcgctggactctccaagaagggctacgcgccgtacaacccgcgcaagaagaaccaggacgccatggtcatcaagtacgacggcaacacgcagtcgctgcttttgtgtgtgttcgacggccacggagaggccggtgacggcgtctctggggccattcgcgaccggtttgcgactgagctcttcgcacacgccaagttcgagcggtccggaaatattcaacaggacgctgagagcttgcggacggccattacggacacgctgcggtctgtggagcagactgtgctacgagaccccaacatcgacacggagttcagcggaacgactgcggttgtgactgtggtgcgcgataacctcgtcgtggtcggcaacgtcggtgactcgcggatcacgcgtggattcgtgaagcttctgggtccgtcgggtcccgaggcgctcggctgccaggagctgtctattgaccacaagcccgaccgaccggacgagaaggctcgcatcattgccagcggtggccgcgtgttcgctgtcgagtacgacgacggcattgacggccctccccgtgtctggctcggccacatggatgtccccggtctcgccatgtcccgctcgctgggtgatgcggtcgctcacactgctggagttctgtcggagccggagtttactacgcgatatctcgacgagaacgaccgatgcctcattgtggcgacggatggtctgtgggaattcatgtcgaacgaggagtgcatggagatggccatggggcagcaggaccccaaggtggcagtcgatcttctgatcatggaggcaaaccgccgctggatgaaggaggagcaggtcatcgacgacaccacgatcatcgtggcttacatcgacactgtcggcctgaaagatagcgccaaggccgcctcataaacgacgagggcgaatttataagcacttcagcaagttgcaaaaccccaagatctctacagtatcatcgcccgcacacattttgctgcctttactacacacctctagacaacgattagcttgtccggattaaataatatagccacgagctctcatgcatactacacagcttcgttttattgtactatctgataggaatcatgcacgttgaagttgtcacctggagtgttgaagcgatgacgtaacttttcgacagtcgttgggcttatcaattgacgagacattcgtaacgcaacacaagtcaagccaagagaacactgagctcatggggggaaagcgaattggtatcattgtgctctttacatggaaacggaaacgctgccctctgcgcaggagctaattagctcgcacgatgatgctctgcttcttcagcagaaacacattttccaacccgtcgccgtcgactttactcccatacgctggacttaaaagtcgtcgtcgtcatcgtcgtcgtcctcatcactgaagtacgttcgccgcttcatctgcaccaacacaacgaataaaaacacctcgtaagattctacggcaaaaatctcgatcttcctggccatcataccgtgactttggtgcgctgcttctcctccgagacgcccacttggttcagcaggtcgatgagcttgtcctcgtcgatcttggccgtcagctgaccgcgctgggccatctggatcaccatgtcctcgatggcgcgagccttctcgggcttcacgatcgctattctagccactgaacagcaacaaaacctcatcgtcagccaccgtcacacccccagcagctagtagttagcttctttcagtacgtacagcgctcgcgagcgtcgggcagcatgacctgctgcatcatggactggcgcatctgctcctgctccctagagaccatcagcagcacagcaaagactcagctccagaccctccacaggcgtcgatacccccgctgacactcactgctgcttcatctgctgctgctgcatctgctccatggacatctgcgactgcgccgccgtcttctcctaaagtgggtaaggaatgatacacggcaatgaaggctttggttagggcgaaccactgcacggttgggagcgagagcgggctcaatcgagagcggagagagtgaggaaagtgaaggtgggggttgtggcatgggaacgaggctctactgggccgcaggggcggtagctacgtacgctcatggtgaccgctttgactcgtttggtcttgtcgtgtgcttgtttgtgaatggatcgatggactaggtgtgccacataatgtagccatttttcgctcgggaatatttatactgcatttggcattttttttcttgagaaaacgtgaaattgtccaatttgattcaagcaaggtttgactcggtagagagatattcggcaaattacactcgtagtgtatcccatcacggaatacatgtattgtgcttttcagttgttttggcaaatcggacgtgtaaaacagctacctactaagacggggctaggttatcggagcagattagcaggcccctcgtagggaattaggaccaagaattgctagtccgatggaagcacttgcgtaggtcctacaaacagccgaaagcccgaatgtcgtccattctcacggcattcggggtttgaggtcttaccaaggactcctgtcaagtcttgtggcaggactttcatacgagctgactctaatacggtgtatgtcagacgcagaataaacctaggtaagcacgatgcggtcgatacattaaacaaccaagtcttctcccttcgtcttcgtgggttccagcactgattgcttccccaaacaaagcttgcttggcttggacgtccattgaacggagagcctccgggagaccgctcatcggactcgtccgagatttgcatctcagatttagagacccccaacctcagattaactgacctccaaagtcctacgtaggactcggcaaaatgaccgaaaggcacaataccccatttccgcagccaatgctctattttttctggtcttaacatctcgaaatcgaatacgttaagaacgctaagtaccttctttaatttccaagctgcacccacccttccggcatttgcttgattgacgtaagctcgagagcacccgaccagggccacgcgtatatcacgaccttgtacttgtttgttttgcatgccacatcgaagaagtcgtatccaacatcctattcggagtcaccggcgcaagcgatcacaggaaaactgtatttggtaccgattttcagtggcagcgttcatcacatctgtcttctgggcaaagggggtagccgacgccactttgagataaatgtcaacaccagggctgtaggcctgatcgccgacaacagaacaaagaagtcactgtcgtcagccgtttcgtcccttgctttgctgacttggtgtgtcttggttttggcggtagccgtggccagcaacgcaaaatatgcgagaaggaaggatgagatgcgcatgggtgccgaaagttgaagagcggtgtcgattgagcttgtcgagtgccgagtaactttgggaatgacacctggttagcaatgctgactcagtagaacgattaatgatcacgcgggcccaagagtcaattgttcaccacatgtaagtgatcacgagccaaatgatcacctccaagtgtattcgcagatcgaagaactgttggatgacatcgaataacattcgcgctacatttgtagattctccgccatatatcaaacgacattcatgctacatggaaccatgaagctgcttatgtcgatcggtcttcctcgatgtagccccataaaaataggagacatttaccctgaaactagaactgcttgttattcttcatgtagagacttagttccgtaagcgtttggcattcccgctcttgtacagtacagtacatatatttacaaaaatgcggtacaacaacgcagaatatttcgtaaacatttggtgttgtatttattgtagtcacaacccaaaaccagggcgtcaccaaccgctcattccacaaatttcaccaccggccacaagtgtccccgcctccccgtcctccacgtctaccaaaatccaagactaatcatgcgatcaaccagcttggcgctggcaattggggttattctcctattcctgaacgtcaatgttcactccgaaccgacgaaagatggtccggcggctagaactggcacggtgctgcttaacgaagtccatggtgacagagttagcgacaaggctttactgacaagtaacgaaatgagggacggcgagcttgtagaagaagaaagaaagataaacttgtccaggtggaaaaagtggactccgtggacatccatttacaaggacgcgcgagtatacaaaaagtgagctgcggagcagttggaacgattccaacagatcgcggcgaagaagaaggcagagaaggcggccgaactagccaggaacgcaaagctacgaagtcaaagggcttgatgagcttctcgcagatgccaacaatttgcagttcgaaaaactgtcttttgttgaagatactgacatctaacgacattcttgctatcctatatggaactgtgaatctcctcaatcagttcagcgatcggattgagaggcaggcgtcagatcgaagcctgttaagatctgtaataaaggtgtagttgagcatatatcggcgggtctgtctggcctgtgaaggtgccatcataaccgtggggctcgtgcagcgtgccattccaccaagctgaaagcgaaatacttttagaagtttgagtagcagataactacgcttggtcacttggtggccattatcatacacacacgctcaagaaaaatatgaatggatgcgttatagatcgccttactggtattgttgaagtgcaccgctaagtacggttccgttccgtacctgaaccgttggcacggttcaccctgaaccgtccttgaacgcttcctattggctaatcttcgggatggtcaacttggttggctcgactgtgcagcaagcggtgattgcacaagcagacacaagaggacaacaagaaggagaagaggggagtagagtttagaaggacaagtaggacaactttggtaactttaatcaactcacttcggcatttgccatcaacaacaccggcgttcttcaataggtattctcgaaaaaaatactactacagctgcagatagtttttttccaattatggatacgtctgtccaatcagaattcacgttatctactattaaatagctctagattttacgttatcagtttcgttttactattcagctagcgtacagcttgccaccgtaggcgcacgttcttcctgacagtgtacttgctccctcgagctcatatacaaaggtgcccagaactttttagcttacctttgggtatatcactaccgctccagataagctacagcatattatattcagagatgaaatcaacctatttcatctgatcggctggcgaggactttgttgtttagccaaagaagttaagcgacaacaatatttctcgttagggctcatagtgctaaacgaacgcaatatacctcacgaggaaacagaaatggtctactaagaatcttgaaaactcgacgatgcgttgagctgtcgactaatacccagaacatctgtgtgtaagggatggactccagcgcagatgctgcttaccagcaggtgtgcatattatgtattcgactctattatttatattttgaagtatacttttgatttaagcaccggtgcataagtccacattgtagtcaaacataacatcaaaagctgacttgccactactccctcggcgccagaagagctatgtactacagtagcaggtcatgtcttgtccgcagtgatattacatacatcacgcctacagagaacaggaatgttagaagaagaagatacaaacacagtcaaacatggcaccgggtttactcatcgatattgagtggtttttttttggcaccaggcatgtagacctcaccaccccaaaaaaggatttcatcgccagagatttgggtggctcaacgcaccagagatttggatcaaagtttgatcccggtgttttgattcaaaacaccaagctttgggctggaccaccataatagttgatagcgctgatcggaagcataccaagaccacatatgtggtcattatattataataacgcttgtacgctaaggtagactgaaatgtcccttgcggcctgccacgtacgtcgctttgtgggtcgtagatcactacagggacccatgccagtagtaattcatggtttggataacacgaaactattgcttgtttggccacagtctttccgtataggctgatagtgcccagctttcaacactctttgcggtagctgtaaatccccgccgacacagctgcagcgactgcacgcgttcgcagttatgtaggttcatgcgcactgcgccgcgagcttgttcctgaggagcggatctccaagcgctgactgttgaacatcagctagcgccggtatgaggagctgcgcgaagtcgaccccacaagcttactatgatcggtcgccctcgttgcctaatacacgtattgcatgcttcggatagcgtagaggtcgcgccacgtgacgttggtgaaaactgttagcgctccatttttttaagtgggcttttatagatttgtactgagtctggtgcgtgaatagtttgcctttgaggagttctgcactggtgcaaatgtactggtcaagagtaattagtactaaattttgtaaactgctactaaaacactggtgtatgagatctgaagtcacatacttcacgaataggtacgctcaagatgtgtgcgccatgatcttaaggtccgaaggaatgctaagaatgttggctggggtgtagttctggtcaattacatatagtcggatgatctcgtccttcatctgacgagtaatgacatatcgacgttgggaggcgacacttaaccggtgttttccatcagcatagaatactttactcctgtcggttcgcaccgtagcaccttcagccagtaagtacacactggtgagcctcggcgttgcatgttgtagtaatacaccctggagcgcatcccgtgctggtcgatgatgatcgcacagactgtgcatgtgcgcgaagtgctgtggtaggtcgtcaatgatctcaagccatcaatgttctggagcgctgctgcctctgatgataccctgactatctggaattgttgttgggcgagcagtcgagattcgccctggtgcttagagctgtgcccaaatatagcaaccgtatggattggtatgcgcatcaggttatgctcaatattaaagggtataattcgtaatcaggccttaatcgaaaaatcaagagtttttgtcgatgataacagctcactctatacctcacctgcaaaaaatgataacaacattttttcatccctgaaaacgaaaacgaagatattgtttccattgcacaaagttgtctgctgagcttttgcgttgccggatattttcgtcgtgtctgtagatcatcttgaaactggaaaacatcgaaaacaaactacgacctaactgatggaacaggtgtctaacgaacaggctggagtaaaaacggcgttacttcgagtaagtccagacatggaattgaacacgagtacagtagtcatcggttcgggccacattatcaactttggtgtcgagaaggggttccaaacatcttcgtggcccagcgtatatgggtcttacggaatacggatagtttgtggcctcgaaaaccttatcgtgcaacgcacgataataactaggacgccatcgtcatgtagctattaactaacttattgccggcagcggcggcgcttggctagtttaagacaaagacttcgacttttacatttagcagagccacccacctcctcagtcagcgctctatttgtcttagcatctcgaaaccgattacgcaaagactatggaactctttgcagacacccttccttatattccatgaagcgcccacccttgcggcatttgcttgattgacgtagctcaagaactcccgtccaggaccacgagtataccacgaccttgtactcgtttgtttcgcattcgcccttgaagtcccacgcaattccaacttcgtctttggatcctacgtcacatgcgtacacaagaaaagtgtacttggttccactcacgccacggtcaacgcgcttctttcgacagcaacgccagtggccctcacgaggagataagtatcaacatcgcggctgtaggtagtcgtgttcgtaatcgctgagaacagaacaaacaggtcactgtcgtcagcccatttgtcgcttgttttgttgtcttgggaccccttggattttggatttggcggtagccgtggccagcagcgcaaaatatgcgagaaagaaggatgagatgcgcatgggtgtcgggaggttgaagagcggtgtcgattgagtgcagagtaactttgagaatgaagcctggttagtaatgctgactcagtagaacgattaatgatcacgggaactaaagagctaagtgttcacgaagtgatcacgagccaaatgatcactcaagtgaggtgagacaaatgtgcattccatgtactctaagtattttgtacatgtacccgtgtatcgggactgctaggggtgatcatttggctcgtgatcactttcttcagtagtgaacatttgtctctttggttcccgtgatcataatcgttctactgagtcagcattgctaaccaggcttcattctcaaagttactcagcactcaccaagctgctctcaactcccgacacacatgtgctcctcatccttccctctcgcatcttttgcgctgctggccacggcttccgccaaatccaaggaaccccaagaagacgaaccaagaatcgagattttcgacgacagtgacgtgtttgtgctggtttcagcagtaacgaacacgtctacctacagccctggcgtcgacatttatctcaaagtgacgtcgactggcccctctgtcaagaagacaaatgtgatgaacgctgcccgcactgggagtggtaccaattacaacttccctgtgattgcttgcgtcggcggctcagaagacgacgttggctttgctacagccaacgatgatgaatgtgaccgcgtatcggagaactacaatgtcgaagtctttttggatccgtggtcggatgttcttgagctcaggaaaatcacaaagatgccgaatggttgggggttcggcattggcttgagcgctgaagggctcaaacggattagccggcaactaatagagcggggtgatgacccgcccgtcctagttggtagcagaaacgaatacgaggtgataattagtcaacctctgatacttaacatggggctattggcggttcaattgtctcaacatcattgcatgtttggaacactgctgaatataggtgtcgagctcaacgtacatgatacaactgaaggagtcagggatccacaacatagactaggggtggtctaagctgtttgaaatacggaattatacttttaaggtgggtccacgacttttttttaaaaataattatgtgcctgcacgaagtattaatagtgatctgaattcagctttatatcctcagaactcttttggacacattggcaccaagtagctaaagccaccgtctcatgctataaacaccctcgtcggagctagttcattcgtgacttgctagagattaacgcgtatgtgtgcattagggatgcaaagtcttcgccacgttctgcatcgaatattcaggtccttcgtcggcttccaagtggatctacgagggcactactcggtgaaccgcatgcaagactttaataactaccaccgcaccacttcggtattttgagctctcctcttttgcttcatcctgccgctgccgtgcctagtattcttcgcaatgatagaagctgcaccattggcatcaccaagcgacggttccacagcgaactacatgtactggatccgaaacttcatctcggggattctacccacgagagccatcatggagcagattcacatcggcgttccaggtctgaacataacctccacgcagcggctcgttctatcgatcgtcgccatgctagcgtctacagcttaccgcatgacattctcgagttggatcggtttctcgatccctttccagctcatgtttggattcccggcgttcagcttcgcactcggcatttgctttatgggtttctttggccggatcctaatgcgagatcgcgcattgcggggggtattattcaaagctatcgtgatgctcaattcccaggttctactgacgattgtgtacaccttgtacttatacggcttcggatcggttggagaatccggtcagaggttctacgtcctactgcttccaataatcaagatcatggcttaaaatttgatgagcgcaacgtctggtaccgcttttgacctttttgccccagatcatgatcttcaacgtcgacgtcttcaatgggttgcacgtttcgagctccatgaaagtctccaacagtctttctacgacctgtctcgtgttgatattcgacgtggttcaaatgctagtgtccatctcagacatcagtaaaatgatgaagtaaatggacaccttgcgacgtaagatcccagtcaaccacgctttgaagtcagccagctttattgatatcgcgttgcaaattaccaaggaagataaccaagcacggacctaccttggcgattgccgctacgactctccggtatcgatactacgaaactgtcgcgtcgaaagtgagggtgacatcagttctatcggtcgggctacaaaagcttccgttcaagtgtcacctgcggctgcacaaggcgcatcagttatggtgagacccgcacagcacccggagccacgaatggaagatttattggacgaaaggaatctgctgatgaacgttttctcatcaaaagaacgaaaactatttgtgcacaagacagcccgggttctcttcactacggagttcgtcatgctcaccgagtacacggagatcatcgttcctctaatctactgtaagcatattgttttttctttggtttctgtatttctttatttacttattttttattgttacggtgttattgatctacttcatggcatgcgtacaggtacctacacggtctcaatgtttttttaaccaaatcgaccctattacctgcagctcaagtcacttgatgaagttggtcttcacgagaagatcgatagtgtgcttacgtatacggcgctagagtttgtgtcgttactgacaatcggctacgtgattcaacgaaagcagagaatttccatgctacgcttgatttcgttcgtcttggataaaggctggcgaatggtgcaagcaaacctgtgcctctggatttccttcacaattgaaagctccctagaacatagcggtaagaacgctcgtaaaaatgttgtggtgagctgtatgaaggcttacattatataaatgcaccacaggaagcgactacagcttttcattcagctggctcaaaagcaaaaagtaagcagtacagcggctccagaaagtcaccgcccaggcaacttcaacatcgattttgggcaatagctagacaaccctaatcgggtcgcagtgctgcgggtacgagtagaaccgccagcgaaccccaagacgaaaacattagccaataatatcggttcgcgggaagtgttccgccaatcaccgtttattcaaaacaaggtgcaaatatagtgagcgcccagtggctggcctcttgccaattatataaaattttgtatcgagggtcacaatgttgcacgaatgttgctcgatcgaagccatgcattttggcggcaacgcagcgatcgttgccgcgctagttgctctcattctcctattcacctcacttggaacaagtcaagctcaactatggaccaaggacgtcgccagcactcgcacgagatccgttatctctgcgttagcaagtggaagaagggctacagctactctagaatcgcgagggagcaggagatggcccgctcgacagtgcgcgatattatcgcacacttcaagttgaatgaccactgtgtcgtagctccgcgccaaggccgcccccggctcactactgcctgcgatgaccgccgcattctccgagacactgagaccaaccggttctcaagcgcggcggtcctggctgttgcagtttccaaggacactggccgcgtggtgtcgccgcaggtggtgcgcaaccgccttaacgcagccggcctcaacggctgctctgctaggacgaaaccttacctctccaagaagcaccgcaagcagcgcctcgcctacgcaaagaggctggctcatctggagaaggacgactgggccaatgtcctctttacagacgaggcatcggtggagctgcacggtaccagcggtcgtgtctcggtgtggcgccggacacatgaagccttccatgagaagtgcgtcgtgccgaccttcaagtccagccgcaagtcgttgatggtgtggtcctccatctcagcagacggcgtcggcacgatgcacttctgcgagaagtccgtggacggcgcctactaccgacacctgcttcaacaggagatcccgatcacccgccagctcctcggtctaccccagcctaccaacttcgtccagatctcaacccaattgagaatgtgtgggcgatcataaagcgggagctgaatcgccagccagcaacctctattgaggacctcaaggtaaagctccttgagatatggacatgtcattcgcaagtgcatgctttccatgccgactcgcctggacgctgtgatcgccagcaagggggctcacacgaagtactgatttgtgacttgatttttgtatgggaacgaggtgggcggtgatttttatcaccgtgttttgtaatttttgccagatttttcctgataaaaatacaccaacgttacgtttttcctattcattgaccttcacttgtagtttatccttttgcggttccgctcgtgtttctccgacaggaaaatatgatctagttcgtgagcagttgccaaatatattagctgtatactatgtgggcggtgactttctggagccgctgtagtatcgacaggcattttgtttttgataaatattttttttgccaaggaacacaaagccatacaaaggattgcaaaacgttttgcgcaacatgtgtcagtacgaaccaaactgtgattttaaaagtacttggaagaagaagtagatcctgttcgagatagccagacacttgttgtaaaactcaaagctaacaatagcaatgaaagtgccaaaactacgttattcctgctctacgtgtggagtttccgtgtcatgacccaaacgatgagctacggaataaggctaaaagatgtgatacaagcatttcaagccccatcacaactcaagaatgtttttacagtctccagtgtgcaaacttgtttgcgttgcagtgcaggaaccacagcaactctcaatccccgcgatttaccacgttgtttacgacaaagtttgtgcagccttttgagcgatgagtgtggagccattgcacgacatgaaacgggccgaggtccatggccgctttagtgcaaccttcggcttgattccagtgcaatcatttctcaatcgccaaatgaccgggacttactaaagctacgtgataaaattgctagagctacttagaggtacccagattttggtactcccagtcggttgctgtagaacctgtaatcttcctacaaacaattcgccaagacacacgacaaacaaacacgcccgattccctcgtaagcttcgctgtgactgaagccattctgctcgcccatgaacatccggaatgaccaaccatctccttaccaggaaaaaggggctgaggtaaggatacaaatactcatcaaggagccgcaacgatgcaccgaaaatgagagcacgcgctcatatacctcaccgccaaacacgcagcgcatcaaagaagtcatcgttgtgtcaacgtcgctgagttcgctgctgtttgtccaacaagcggttttgctatacgtgtagctgtttatcggagaacttagcatctattatagctgttccagatattacctgtagtcctggtgggcatcaagtatcgctgtcaaggtgcaagcaggatggcaagagccccctaggcactgaagattcttcagcatcagaactgctagagcttacgaattgtgtaccaaaatatgggtaccaccaagtaactctagtacttttgtcacgtagctttagtatgtccctttgcagctccatccattgctaccaccgtacagccacttgactacgtgacaatgtccatttgtcgccgcctcattcattccttgagtcgtacaaccagcgatcaaattaacgcgtagccatttcacaacgtatggctacacctgctcagttgcgtttcctactatcggcgctacagcaagtctgaatcgcttcgagcaccttcacatgcccaccgcgcagcaattgcaccattaataccagcttttcattttcggtgtcgaacacgttagcatttctttctgttcacgaaaaatccctcccacagccatcgcacgacttgagcatgaccatttttccagctccggccacagtatcgagagtgactctggccgtcgtgcacaacgcacaagttgacagcttcagatctgaagcatctgtcccacccctccgtgcgctggagagcggtctcaagcgcccgcgctcaaaaatatctcgcaacttgtagatgcccgtcgctgccgcggtgtgaatcgcaagactcgcttctgctctttcatctgtgacgtgattcggattgccgccactcccctcatccacatcctgactccaatgggctcgatgtccgaaaaaaattcgcagttcgaagaactgtcgattggggaaggtttttggatgacattgaacgacattcacgctacattcgtcacttcacccccgtgcggatgacatcaaacaacattcacacaacattatacagcactcaatagaatccggtctgaattgcacttacagcttttgatagatgcctattcgcctcggagcttttccttctagattgatgccagaggagtggagctccagcacaaacattttattgtttggaagaatgcaattcttgctattgcacagataacgttatgaacatggacgttgttcgtcgtagtaatggcatctgtgacaattagaagcctcgatgctgaccttgagcacaactggtgtcattaccacatcactgcatcgtattaaactgcatgcggatccacagcactcaacatagtactcactcatttcattagtgttaaagctatcgattcaatctgttcagtcttgggtcataacttataccctcctctttcagacacagattttcttctgcatgcatagagatttattgaaaatcttttggtcacctgagtttgccgtgacttaatttgtcggcaagctgatattgtgtgaattcccacactcattggaatgtgtctggatggattagataaaacattccactacaacttcgcataaactacttaacgtttttaagtttatgcgatccaagatgggaagtatagcttgatttttttttcattcaacatatttttatccaaagccaaatctatccgccggcaatgcagtgacgtcctatacggtggcgaacgaattcattcagcggaaactcaaaagaacggcacctagggttatgtattctccggaaaaaaggctaaaagctacagcaaaaagaatgacgaccgtgtatgaaatcgggagaagtatagttcaaatcaatcgagatataaatggctcgtgtggggccattaaaaatctacactcgcttaggcattttatctacgaagactttgcatgattaagcttgccttaactacattgcgaccggcggagacccaccgataccatttactactgtagaataatcttctactttatcctgttcatgttaaaacaacttcaaagtacattgataccgatattagttcagatcatcctaatgctacatgaatgcggcacgttcagtttaatacgtgataaatggcaataacacacttggtcgaatcgaagctgggagtttttgttgttgttagatattcaggcgatccggcgccatgttttatcaaacactcctacttttctgtactccccggttcctgcaagagaggaagtccgggcggacatcgtcaacgcgaaggacaaacacccggtgtatccaactcctacacgcgatcgagatctgctagacctcagtcttaacttatcaaacttgaagcaaattgctggcttcatgatatctgcgaatctgccaccctacggagagctaacgccagctccaactcgacgagtctggacagcggagacagctcgtcgaacggaagtgttagtttttactagccgagatgtttttagctcgaacacttcctttcacgaaagtttgtcgtacgaacaataataacagcaactccggttgaagtgtactcataattgccgtcgacttccgaaggagagtatggggtagggcttgattcattggctagaaggttacgcgaaacgctagttgactgtcatttagcaaaagccagtgtcaccctgatggccccaatgctggtgaagatttttgcagtgtttttgctgatgttcctctgcgtccagggcatgactttgactctgttcggcaagcccagcgatactccgcgtacgatcaacatcgacgcggtgacgcagaggtgctacaatatctacaactgcttcaaagggcccaacatatcggcgacgtggcagggggtcaagcgcaacaccaacgtcgtcttctacaacaatccaagctgccagacgcgccatgcagtgagatccgggtctcctgacggcgcgctctacttctacgatgccaagttcgacaaaacagtgaaggccttcatgatctgggaaaccggaacttataccacgaacggggtcttggacgcgtgctatctcgacgagagcgcaacggtcaactcgacagccgaatcattcgctgtatgatgcagcaaaagccactctcacggacaacagttcaccttcaactatcggacactgaattccgtttcatgttccccattcataaaaaaaactactttttttaagcgctaaatatttagagtgcacgtgtttttttctgttttttcgccgcctgtaagtttccgagcacaccatgcaatctaagaaatataggattctgcctgggcatcagcgcacgttttaaaggcaggaaggaataaaattacgttgattagctagttgttgataaccgttctactaactacaaaataactaaagttaaaactaaatctgtggagtcctaatccaacgagcaggagaaggtagaatcaccacgttgggtttgtcaaacccaagagttgaagtaccaattatttggagcgaactggcaatgcctttgaaaagaagcaatcaaacttggtacacttggttgtacagtagtagatgcagatgcttcggctgcgaagcaggcgatgcccgagtacgtcgtttccctgtaagggcatccgtacaagctagcttcgacctgcgagaccccccggatccaccacccgggtccccataataacctcgtttggtcgaaccgatcgcttaggttcgtagcatgagcaaagtattgtcgttcttgtggaacaacatcgaacaaatcagccactacgaccatcattgggtgctgtactctttggcaggagacccagctgcgctccaggagccgcagagacccgaacgagctgagcttgtgcagcgccaactcgaccgacgagtccaggaactgcgagacggaggtggcgacgtggagtaagttagtgaagtcgctcttggcgcggaaaatgagcttgatctctgaatagcgtggaaatgtagtatagtataacatgtagcattgtcttctttcctcaaattctctagtaccaatgaaacgataaatttagacatctcaaatttcagagcttcttcgggtcgtaggcacgacttcgttacggtgatggagagccgtgccacatagatttgttgtcaggttccctgatgagcttcgtgcagagtaaatacaattttccttagtcacgtcggcaacacggccgctcgtccagggttccatcaacgcaccaccaatgagccaacaactccatcttgtcggaggagatgccagagagattcgacataatgtagttggtcgctcgagagcaaattgaaaagtgatattcggaacttaaagcccgtactcttttgtatcctagactagcgactcacctcttgtccacccgttgcagagtaatgaaaattagattaccgggcactgcgggcagcgtcccaaaatctaaatatgaaaactgtcccgtaaaccgccccgtaacctttttacctttagcccccgtaatccgtctcgtaaacttacggtctccgtaatttacttaacgcactgcgttacattcggcatgctgccctgggtctcccacgacgtgggaatgacgagtgggtagaccccgaggccgcgggcaagccaataccggtaccatcatgggccgcccatcaccacaacggctgaagttgttggcggtatgcggcggcttcgtagttcttcaaaagcacaaataatggctttggcggcacgggacgggcttattatcaagttttttttgtggttcgtcaaggatgcagaaaaaaggatgtctgtcgagtctttacagcagagaggcggtttagcaaggtgaaaaagcacgggagtgtgctatcgggactgaagcgtagagccaagttgggcaggtactaatacgattgataggtataaccttggaccgttgaaatttaaacgacagcttcggccgatgagagcccagttacatctacaccgtgcttgtatgcttcgtgggtgcattcagcaagctcttggcactcaagtctcagagtttccttgagtttcgggaactggactgcccagtagtacacaccgtcgttatcaccctacgacacaactgttccacagaagctctcgcgtttggacactccagccttggtcctgatgtcgaaatcccgcatgacgtgccaatggagtgggtacatgtgctgctttagataccgcttgatcaatacatcgacggagaactggtgctcgtcattgcctttatcaaggcagctttttgccttcctttgacctccacttgcttttcgcgttggtagtgcagtgagaagtctactcacgttgatttccttttgcagaaccataaccgcgagaacatgagagcactgccaccccgtttgggcaaacattgcacaatcgcacgcgtacttgcgtcggacagcctgaatctgcatcaaaacgttagttgaacgagttgacatgtcatcattctagcaaattcgcacctcttcaagcgaaacacgcgctgatgggacaaagttcgtgatagtctcctggtgcagtagcttcacgtggtggatagagaggcagtaaagctccacatttcgaacggaaatgtctttgggtattaaacaaataaaccgatcaagtactaggatgccttaccaaaatgcaagcgatacgttccgtccgtgacaccgaggattccatcctcgttctggccgttatatgcctttaacgggtgatatttatgagctgttacgttagcactattcagctgttccccacctacagcccctgttcgcctgtcatgaaccctgttcagctgttggtttctgtttaacctgctacttttttatggatttctcctgagatgagtgtggactgtggtttacacaccctagaccccagcaataggaaatcttactccgagttgcgggaacaggcccattcgcaggaatgctcggcaatggtttccacctctcgaaattccgcgcggccctaatttgcgagtacagtaccaggttttcttctgctacgtgcccttgcaatcgctcactaccttctgctacacgaccctacagcgctttggttttacttctgctctccattgattcttcagcagaaaagagcagtccatttgcaacttactggctatgggagtggccgatgtacctatgactgaagtgcttgtgatgaggtggttttgaattttccaagagcaagtatgcgcgcgaatcgcagcttgagcttgcaactggcatttaatctaaaatactacgtagtatctgttggaaaacaacagctgaccagggtccttgacaggtcaataggagctgtacggtaccaacggctcgacagtgctggaacaacaggtattaattattttccgcctttaacacgttccagaagatggcgcgtgacgtcagaatgagaccgcagcattccgctttttcccgtcatctacagtagagctacttcgtgcgagaagcactcaagcaccaacggtccgagcttgagatctttgtccatagagtcgaacactgcgaaatcatgctgccgatcgaatggagcattagatgcgctgcttgaaccgcgcggaaagaactcatcactcgtcgtgcacaggtgtattgaagtccactctagcaaccccgcaacattttaaatttcgcagccacctaccaacacacaaatgtattaagttcacaatgtgaacttcacatacagcttacagttacaaacgcattgatgttgatgttcacctgcacgccacttcatgagtgttgctttcctgttttgttttagctgtgcttcaccaggaacaaacccgtagcgactaggtatgtcgatatcccgatcgaaaagtattttcctgcacttcttggggccacagcccagcaaaatgtcgtccacctcccgaagaaaaaaaccagggatccctcgcttcttagcatcggtaacagctcccatgtgcatacctgtgtcttgaagccaacatgtcagcacgtcctcgtcccttgacggcgccaaacgaacccgcttttcacagttttcatgcgaaatgcagcgataaacgcttctaccatccatcctatcacctcggttgccataagtgtaggcaaatgcgtacagatatccaccgtagccatcgattccgagtctcgccgcctctgtcgtctcaaactccactcgatcaacaaacaccagcttttcgttcaggataggctcttctaagtcgtcttcagacgactcgaactctaccgtccaaccacttgcttgatcttcgccaaggtccgatggcagctgggctagccgcagatactaccagcggcgccggttcttgctctggtagcgtaatagacacgtccagtgaagctagtgacggcggaactggcatgacacttggcagaggagggacagctagacatcgagagcttcgcgaaaccaaagttggcggctggacaggtgatgctgccagagcgttcgcttcggtcgtagctgctcttcccagcacaacatccttccatgttcggccgcctacggcggtagcaggtttgagcgcacatgcgacgcgtctggggctcttaggtgagcacagcggcgtgggaatcatcacagctcgtggtgacgttggcggtggtgtgtctgcgattacgtctcaaaggacagcctcggcagccatcagcttggcttagtggcctaccgatttaccatctcacttggtgccccgccgttcccatgaacgtccttgctaagtcaccgtgtacaaatcacctcgatgaaccgccgcgtttgtcttgctcaaaagccccaccgtggcggcactattagggggagtcgaacattgccaaacacgtactcaagttatgatcttggccgtgctcataatctcgacagcattttgcttaactctgaaacaagccacctccggaggtggcttatctctgaaatgagcagctcatttcagagacaagcaattcccttctttgttccctcctctacaaatacctccaaattattctattgtacaatatcctgtgatacacgttctagctattcaatgctgttagaaagggctacatcaaattacattgttctcagtatcaactttggtatcgcatgtctcttgcataatcagtattccctacaaagttacacaccatcatttgttgaagaaactggtcgggatctgtagtgggacagatggcggaaaagttccctccactcgactaagtccgaaaaatggagggatcgacatgccactcccccctcgaaaatggctcatcttttcgacactttactgctcagaattctggctcggttttgctcattatttttggcgtttttgagatgttcgactccccctattacgttgattttgtactttatttttattagatttactaataaagttgggatattttgatttagaaaatacattttaatttattgcggtttagtcggctaactacactcgatactgcgcgctgctgcagcctcgcctacggatcgcatgttgaaacaacacgcgcccgcggtagtcgcccatgatttagaaaatacaggactttcggtcctgcactaaggcttgaacaccggtacccagggtactacatgtaccctggactcaacattctgagatgaatgtagtcctatcgatgaggagcatttggtatgtacacctactactgtagtatggtatcatcagagatgatagtgcataaaagagggagaggacccatcaccagagatttggagtacgccaccacagatttaggccgcatcaccacagatttggtgccaagcaccagtcaaacggctggcgccaaatcaccagatattcgggctgcagcaccataagaaagggttccatcacctctttattcggctacatcaccacctgcaaatcttctacagtgtagtgtatcagtaatggcactgcacattattgccaccattgtattagcgttgtgtatgtgaatggatgagtgtgatgcgtactgatacgaattatcatgcattgttacgccgctcctacagcagctagctaaaacctacgtcgcttggtttgatcgcatgattcccgatttgaattgctggcaggccatgttgccgggcgccgtccagtgtcgtgtgcaagtggacctctcgcgccgtcatcggagccttcgaagagtggggcgtcatacaaacctgttgggcttcgagtaggaaaatcccatgtcgaacccgacggaagcgcaggaggctgcaacacgtcatgtgcagcagagatgcaagcgcgctcttcatctctcggtgttcgatcggtgggcagtggctcaccgttcgctgcaatatatgcatctactggtcggtaaccaaagggcgcatctggaccccacgggcgactgtaggtatatgctgtttgatgcactgtcagcctggtggaggaacccaccggcatctccattgcctgatgagcgctccaactctggtgagtgttccaattttgaattccatcctcatacgtctgaaagggcagcatagttgcgtgactgtggatccgtgggctgatgattgtaccatctcgcgttgatgttgctgtagctgatagtcgaaatggaggtccaattgcgtcatcgcatactcggatttggttgctgtttgttgattcttgcgcccacggcccatacacaggctggttacctataaatcgaggaggttggagctcgtcgctcgtagcaccggctacactttgcccttggcgttccgcagtcatgttggttccccttccacgtggagcgtgatttgtgacaaaatcttgctctggtgcaggcattccagggtaaggtagaccaagctcgcgtgttgcgtggattatatgcagacacagaccaaatttgccactgaagcgacagctgcaagtcctcgaagccgcattgacaaaccacccatctaccggcatactttgccattgtatgcgcagtacatgaatggacttgaacggcagatttatctttttcggctcgacgtaaaaatcatttgctgcacgactctcggcgttaccgtatcggcaacgagggcgatgcaaaatctgaacaaactggagagggatatcatctgctccagcaatcggtgttaccgacagttcttgcttgcgtacagccatggaatacagagcctttaagcgttgagacactgcaggagtactttggaacgacacttgtatctgaagaaacacaagtcgagactggtccaaacgctccagcatttcaattggcatgctttcttgttcttgtttacgagcttgagcgtcttatggtactgttcaagcgggttatttgtcgccgcataacctggtggcgtccgaaaggcttgacagtggctgaaacgatggtgcaaaatccattgagcaatgatgtgacccgctactttttggaatgccacacaaaacttcgaagctgcgcgccacgcagcaagcacgttctccctcctcttcaaatattcttcttcatttcgggagtagtggaggttgttgaggtcgcgaaaaatcatatcaatggtcactgcttccagtttgccttgtgtgaggtctttcacattttggcagacatggaaccaacacattaaaagcttggagccaggtagagcagctttgcacgcgttgtattgtgcattatccgcgtccgacatgccaaacgctggcgaaaaactgactaagaacttctcccagacgatgcgcttggtaaacttgatgcaccattccacatcaattccagtgcgctgagaagtacaaaagtaaataatcgggaaaaacttacaccggcagtccgaaaccacaaacacgaagacgggattgcgctgtttaacgatgctgtgggtgctatcgatgtgaagcagcgtcgtgcaccgcggatctcgttgtacagtgacataagtttctagcagggcgtggcatgtgactccaatacgaaagggcgacaacttggagcccgtgccaatactgggaaccaactggttgtcatcggtcttggtgtcacagagaagaatcatttcatcactagtcacttgtctgtcttctgcagcgtcgtacatgtgtgtgctacacaaagcaacaacagattgtaaagcttttcgcttgtgaacctttctccacttcttgacgtagctttgaacttgactcaacactggtgcgggtcctgccaacgtctgacgctttattttcttgcacaaaatccctaacaggtcgacaggagtaaaccatacgtgatccgatagtcgctcgtcgatgactgccttcattgcgtcggacatcgggatggtcttagctgtgggtgactcgacgggtgcatcaggcattgtgtgatgtccatccacgcagactgtcgccagagagctggattcacaagcaagtatcctgtaccgacactgacacttcgccccgctctcactacagcgtgctgacgtacactccgtgatgattctgcgcatcggatgccgcgtcatcagggtctcgtcttcatcataggttgcgtggtccagagtacacctcggcactttatcgttccgttgacgactgcggctgggcagcgaatccacaaactcgtcgagagtagcgtcactgctcgtttcagaattccatatttccacccaaggaactctttcgccacgtcggcgaggttgaccgctgccgacggaggtctgtttgcatacaattaacggcgtagataagtacttgccatagttgtcgacataatcagtacaatacttactgtagttatcacttgtgtgggcgggctcctcatacttccagccaaataggacgggaatcctgtggaccgtaggaagagggcaactaagtgaagcgaagaatgccacgctcgtgaagagacgtacttgggtttcttgtctgcgctaaaaataatttgcaaacaagaacacgacgagagcttccggtcttctctttttataaatatttgtgcggaatgaatattaacgttcctacagtgtgaacatgtttgcaaatgcacatagtggtgattcggcccaatccaatggtgatttgggccaatttaatggtgtgcgattgcatccgaatcaatggtgatgatttccttttcactggtggtaggtttcaaatctgtggtgatagggcccctcactctgcataaaagctcacaatcaataaggggtatttatcactactgaccttgatttcgtcgtactttatcagtagtgaccttgatttcgaatttcggccaatgagagagagaggtgcgtgcgataatcttcaggtaacgattatgtaatcataaattgtcaaaacgtgctctactaaattgtacttctaccaaaatgtgaagccaagtttacacaagaagcgtataaaaaataagagaaaaaaacaacttaagccctgtacaaattcgtttattccaaatgatgcctgccattttaaacgttgggcggactaccatgtcacgctagagccgcctacaggactgcctaccatgttgtgccagagctgcctaccatgttgtggtagcgcctgtattagccacaggttcgtcttcttcaagtcatcatgtcgtgtattcacgagtgccttcgcgtgtggcgaaccgtgtacagccacaatagcccaaaaagcttcatggcagcgcattgctaagacacatccagaagaagagagatgtaaaaagcattagaacactgtcatgaagtgactaggctacaaagacactacacctgcgcaacacagcagtaaccagctagacggcagcgaggcggcagctagacgtggaaggcgatagcgcgaaggaaaacaactggtctctgttcgcagaactctcgataagacagcagtggcgttcgaccaatcagcagtcgtcttctgaaatcaaggtcactactgataaagtacgacgaaatcaaggtcagtagtgataaatatccgtcaataagtgctgattgagtcttgtcatgaaacaaattcattcacaaagcatgtcgccaagcccgaactacagtactgcacaaatgcacagtatcaataagatagatacaagcaacagcgtcgctgttgacggaagccgggtgtctccttcgatactgtacagactgtactacactccacgacaaaaagatatggacaccaccaaaagtggctgtaacttcgtcattatttatcgttttaaggtgcggtttgggttagagttgcagaacacgctgataaagatttgcacgctgctaacacgcgcgcttttgcgcttcttcaggtagctcacatacaaatcactggttctgcccaggtgacaaaacttatgaacagctaatccccatacaaaatcctatatcaaccaaaaccccttacaaatgatacgacttggactttgtatgaatatgcttgcagaagtagcgcgcaaatcttgagagcttgttgtacttcctgtgggaggtacatcaaaatatacagccgggaatatttatcaaaagtcaccacaaacaggtgaggttttatcaaaagtcaccacaaaggtaatgattggctattaatcagatcactttacaatcgacggcggagctgcagggagcgcaccctcccccttgacggcgtgcaccgtgccgctagccagcatcgcctccatatcatgacggttccgacttctctacatattccgacaagtaggcaattggtcaaagccagtgcaaaatcggaaatagtgaaaaatccgaaattagatattatgtacggtaaattaggactagggggccgtttgaccaattcttgtcagctttcatgcggtgctcacagccgcgaggaaatcgcctctagaggcctgtgggccgagaaaaacggcaatttgcatctaggcgcaaaatcgactcggggcaatgtgctctcgaggtggcaagttcattaatgagagccaggatcctgtggtgggtccactatttgggttgattgtctttaaacagtgatatttacacttcacaagagtgaccctctcttccagagccactcgtttaaaaacttcaatgaggttttatttaagccaatagaaaagcgccacgcagtcaagctctcggagacaacgccgacagaggccccgcggcttcagtctagattttttaagccgaaccccccagaccgcaagccaagccggaggctccaccctcgacgacgaagctcaatggatgagcgcagggcttgccctgaggagcgggatcgaagcccgccgtcgccaatcacgattgatgggagccttccaaggtgtgcagtgtttgggtccgggcaagcggccacgagcggatggagagcgatgcgctgagtgcccgatggtctctggacgatggttggcaggatggtcatggccttgatctgcgcgttcgtaagctaactgtcttgtatttgttcatgaatatatgtatttgccccgaactttgtgccttacacgtgtccgacgacttgtagtatgttttgggttgcagccggcgctgggtcgacgatcctttccagggcgatgtggctttgatacgccacgatgcgactgtcgagggcaccagaccgatgaagcttgcgtatctcgcgcagcacgctgccagctccttttgctcgggatccctgctcgctcaagaacctaaggaccgctgcttccgcgcgttttcctacgtcgaagactagatctttgaagtcgacagcatcctcgcgcagcacgaatccgccgtcaagaaagagcttcatgtacgcaacgcccaggcggtagtcggacttcttctggcagtcgctcgagtcccagacacggggcagcctcgtgtaccactcgaaccacagcgaggacaggttcgtagcagctttctttcttcgctttgcgggtggcgcttgctctgacgacgcttgctcttctgatgcttcttcaatacgcttcacaggcggcgcttgctttaggatgatcgtctccagtgcgaggaggcgcgcaaacatgagccgattgctctcgataagctcgctaatgacagccaaatggtgacacccagcatgacagcagttgctctttgctgccgacttttcgtgtgcttgttcaggactcgaagcagcagacgtattgattgacatggaccaagacagcatgtcggcgaccgggatatcagccgctcccaagcattcctcgatacgcgcaacgaacagcgtgtcgggcgccagcgtcttcacttgcgggaaatacttgatcaggtacgccatcagcactccgataaccttgcgacttacgtttagctttgcgtctgccagtccaatgcaggaaccgaacagcagctcctccaagcgcgccaggtgttcctgcgtcccatggtccagcgctgcaacgtccgcaatgaccggggcttcgtcggcgctccagtcgctcagcactcgggcgacttttcggtcttcgcgggggggggggggtgttgaagacataggcaaagcctttgttcgtgcgggtcatatcccatggcccgcggtcaaagatccactgcgctgctagccgctcgtctccgttggcgtgctgggcacctcctcggcgaaaggagtgcgaggtcaggttgctggtggcaccggcgggttcagccacccgcttcaaaaagcggttgacatacgcttggactccgtcctcaccgcggccgaggctgctcctcgcgggacatgaagctgtgagctgagctggcagggaggcggtggtggcttgcgacgggttggagctgggaggacttggtgtggggagcagggaagcggtgctgggcggcgacagggacgcttccaaggccgtcgcggtgtcgctgctatccgcgacgctgacccgcagcacctcgagcagaggcgcacctgcgtcgagcgaggttccagcggtggtggcgagagcgggaagctgactcagcagcgacacacagggcgcctcctgcatcaccagagcaacggccagtgtgtgcagggggcaggtgaggaagtcgtcgcggtcaggtacgagggtgaggtcttgatcttcggcagttttcacgcgaagcatgcgtacgtagaaaacgttgtctgctgacactgtgatgtgctgcttgctgatatagccgagatccgaggagcgcccaaaacagtgccacatgaggcacgcgagcgccgcatcttcgtagtcggtggcgacagacgccgtgctgtagacatagcgaattagtgaccttaaatccgccttcgtgcaaggcggagctttgttagtaaatcccccattgtcccgtttcaagcaatgtttttccaaagtcttgccttgctttagcagggttaactctgtaggaacccgaagatgaggatgctcatcgaaaaaccaaagcttaacgtttctaaagtatgaaatggctgtgttagacgccaacttacctttcttaccttcatacgtggcgaggtagtagccaaagcggtccataatggcagcaaggctcttgccagaactgtcaccacgcacacaggcttgaatgacattcatagacacattctctgcttctagcatgcgctcaaaagcaccaatccctgtggtgcacgctttttgcgtgttcgcagggatgagtgcagagagactcatgctgatctttgtctggcgcttctgccgtttcaaagtgcctatgtgtgtatatgcggaggaccaccagtgtctccactgactagagctccggtcctaaaataggtttctgcctagttgttgtaatcatgagcatatttgaaaagtacgtacttgactgtatttcactatgtgcatatacatatttgcgtctcgcttccgacaaatatttgtcagaagctgtcggaactaaaaacctatccctgtgtgatttgattggatgaaaattgtgaatagcgactgtgtgattggtcaggccgtcatatatttcctgttctgtacaatcctactaagctatctgtcggaaaaactactatattcatccataccatgacggtgccgacagcggccgacacctgtcgacacaatctatcattggttaaaagcctgaatttgtttgattggtccaaaacggctattttgaacccttctcgcattttcatttcgtggtggaggtcataatggcggcgctcctgagcgcaatgccctccccaccaggtttcgcatgcgtgtcatgcgggcgccccgtgaccttcgctacgccctcccctccaggcttcgcatgcgtgtcatacgggcgtgcacaggcgtgagcaggtcacccaagacggttcgtggcaagcccggcatgtcggcgtgctcagcctgtgccctcggagccagtcgagagcgaggaggaccagggcacccacgacacaagggcgaggggcagcaggcaccggggggggggcaccaagagcgcgggggaaggcgaggggctcaagcttacgaaggacagcagaggctctaagggcacgacggacggacgggcgtcgtcgttggcggtggcagtgatggtggtggtggccgaggagggggaggagtaggaggagtaggaggaggaggtggagagagtgaggcaggccgcgatgacgctgcagaaaggagggaggtcgagcaggagtcgaagagtggtggcagagcgagcggcagtggaggaggaggtcgtgcaatgcgtcaaggagcgtggcggtcaccgctgaggcagccgtggaggagaggggacacgacggagcggctgccgcgtatggtaaggagaaggagggtgcggcggagctgaaggaacgagagggcacggttgaggtgagcgcgcggcgtactcgagtcgtcgagcctgctggcgtccgtggacaagggagagtgactgcagtagagggcgagtgcggcggggacgaagacgcagtttgcgggttgaagagcgggtggcctgcagcgaggacacaaggaagcgtgcgaggagctggtgcttctcgtggcggcgcagctggtcatgcagagctgccactgcgtgcgggtgcgttatgtacggttggctgggtgggatgttgctgggacctgccccgaagccctcctagctggagttaaaccgttaatactaattaagtatctatttattcgagtgtttcattgcgtggcctccttctacgtgtacatctccacgataagaaacttgcaaatactacttatcgcatgccttgccgttctgctaacatgtggtactagtacttagtagtggtaagttcatgaaagggcatcgccacggaaactcggttaagtttgagaagctagcggaagcgccactacaaaacgcgtaaagcagtcaaattcatgctatacaaactttaagtaaagtgtcggcaccgtgcaaaatatgtgtatattcacctaattacttaacttcactataggtggataacatatctcgacagccctgcctacattatacgtcagcaggagtgtcggcagctcatacacctacacctaacgttgatcattggataaaataccatctatcgcccttctcattcgatattaatcagtcatcgacatttgattggatcatgacagccatacagtggctaaatataaaatcatatgtgtcggcaccgtcacgatatttatccatagctcgattaacaatagcatttggctcgaaacgagattgcaatactttaatcaagtctattttcgtcggcaaaagtgtaagcaagagaggtaaaaatcagaattgcacaaaaacacggatatagagctgtcatcagagatgggttgtgcgtaagccggggctggctaatggggcattttgtatagagaaagacgagcatccccttttaaggtttgcgcgagtacccactttcaagcaacacaacagcgaccgtgaaggggagagtacggcgtatgcggctgtcaagagctcccacgagctggtagaatagcttctaaacgcccgaacacacaataaacaagtaaatgataaaaaccatggatggaatggcgcctaaataactctccaagggctgttgctgctatttcctcgagtttaggtgccgaatatacaaagtaagtataaccggaagtagactatgtctgccgagacttctaacacgaagaaatattaatttgcagccttataacaactgtacggtgtagctggttttggcagcgacagttttgcagcgtatttcgcgccacgtaaatgccggattggaagcaagggcatggagtagtgagtaaataaccttgatcgtgcgtatatcccacaatgacctctcccaataactaaactaagatgacgagagtatcctactactaaccaacttaagcacgacgtatacttcggtttcgccgggaacgacggaggtctggctcgtacgcgcgtcatcaactagtcaatccgatcataactccttatttgtgcgtatagagatcctcttcggctgttttgacagtctccgtgtacgaggcgatttctatagtacgcgaagcccgagtgccgctaccggtgcggccaccctcgatagcagcatcaatatacctgctgcaaattagaataaccgtggaaggcttaaactttttctaggaacggtaaaacgaagcaatttcagcattgcttcagtgttccggattgagaaatgccgtcggtgtaggccgttgcctcggcaacaacactctatagaaatgggcgagctgtagggcatatatcgtaaagctgacaaacaaagcgaagaagtgaagctgcttctacggttatagaacggctttagcactgacatacaaagtaagtcagcaccccaagtactcctttgttagttgtagtgattacccatttttcttaaatgggatacggataaatatcgtgacggtgccgacacaatttttttacttgattatgtataggcagactgaccgcaacgcacgtatattgaccaatgacatctagatttacccaatatcggccaatgagtttgattaggtgtggggtaaaacgatgccgacgccgtgccgacgtataatgtaggcacgggagcaaaaatatgcagggcgtcaatacgagccaccagtctactgctcatcactcgaatatctgccctcttgccgacagaacattcggaaccagtatgagcctccaagacctcgcccccgtcaactcccagcgcgctctacaaaccgcaatcaacgcgttcgggcgcttcgtcgcggcccaaggcgtctccatggacttcatcgctgcctctctcgcagatgatgagagtgaagctgtgtttgtgaagctcatggaccgctttggcgttcacctcgccttcgtcgaaggccgaggagggaagccgctggccaagaactcggtcatgagctactaccgccatgtcaagaaccaccgagccaccatcgagaagaaactactcaagatgggacagacgctcgagcgccattgtctgaagcgcatcgattgtggaatggtcaagaaggcgcctgcctgcacgaaggaagacgtacgaattatcatggacggactgtactatgatgccgccagccccaaggactatcaagatgccgcgttactggcgctggtgtggtacgcgtttggccgagcctcggacctggggttcgtggtgaagggaaacctgtctgtgagtgcggctggcgttgtgttcgtccggctcatccgcgtgaagacttcagacgagcagggcatctctctctttcccgacaagaacagcttcatcacgtgccccctgcatgcgattgcgatggccctggtgatgcaggacgctccgtgcgcacagctgctggatcatcggcaccttgccgcaggcagggacgagagtatgacagcccctgttgacgtgccactaggtgaagctcttgttgcctgcgagaacgacgacacgccaagtgagccgcctcagaaaaagcgtaaactgcctgaaaaaaacatgaagatccacgcctacgtggaccgcgttgtcaagacagcgtctgccgctcaagctaaagcggtgccaactgcaaacttgacgtctcactcgtttcgacgtggtggggctcagcatgcaaacggtgatccgctgcttagtgctcagtggattttcgatcgtggatcgtggaacatgacggctaccaacaaggctttcgcttacgtgttcaacactaccagtgaagaccagaaagtagcgcgtgttctcagcgggtgggactcgagcaagaagccaccggttccaaccctctcctggttcgactccgccagccggcagcaggcactgagcttgggtaatcttcttttccagccaagcgtgtgcacccaagaccccgagaagtagctcaacgcccgcgttgctgaagttctaactgccgtgctgatccagcattttcccgaggtactcgagcgctacccgatgtgcccgtacgctacccggatgcgcgaatgcctgatggcgttgggtttaccaaaagctcaagttctcgcgtggagctctgaactacaggcgaatgtggcacaaaaggatctggaggaatctcaagacgacgcggaggcattcacaagagaagaaaagctgatcaatcaccagaactgcatcatcggcgagctgatagccatgaatcgagccttgaccgagcgggtcacccaactggagagtcagcgcgacgttggtcaggatgactcctccacaagttttcctgcaccggtggtggcaccacaatcgcattgcgaggattccgctactgtatcgaagtcgtgtggaagcaaggctctcccgaaaggcccagcggctatttcttttgagtagtacgcaaaaataccacgtattggaacgtgtgtgcggatcggcagaaaaaatcagcgtacaagcacaccgtgaactacatgaagctcttcttaccaaacggcttcgagctggacccgtcggcccctgactacaccgaccaagttgaccgtaccggaattgaggccgaagccgggatgtacagatttttcgaagagcacggagtcaagagcaaacgtggatcagctgtactcaagcaactgcgcaagtttttccgggaaagcaagctcaactctctagtagacgcgtaccgtgctcgcgttgctgtcgctggcgtaacggacccagcgcccaaggaaacgcaagagctgtttgcacggaagtagttgagttatagtttctaacgtggggctataataaatgttctataccgctacacattacacttcgataaatgtacagcgtacagcatgtagtgcgcgtttgagtttcgtacgcaactgctggaacgcctcagagcttcacagattaaacaacggttttgtgtaaaagaaggattttattgttggtagttaatcggctcgacctcgtaaacacagcccagatcagcaaagaaatggcgtaatccgtcttcggtacttggcttgtagacgagctcgtccgagtcgatgaagtcgcccaccgccgcgcgagcgatgcagtgccaggtaccctcttcttagccaaagggcctaccgatgatcacaaggtgcctaaaactagacctaggaatcttcttgaaccacctttgcgaactgctgttgaacgtgttggtactgttcaggtaccgcagttgatagcccttggcgcgaagtgcttcatgcagtgcttgcatagaattcgccccgtacttctcatcgccgtggggggttggcccttcttcctcgggtgcagccgcgttaagacgacgcacgattggcaccaaatcctcaacggttaaaacaaatcgggtttgcaccgcattgttgatcgagtacaatccacagagagaatatctctcggatgtaccgctctgattctcacacattggaccgcccctagtccgtctacccacaatggattgcatctctgtccgtggaaggtctagcaaatcgccggacgtgaagagagacgcgcacaaaaaaaaagactccccactcttacttagcacggacgtgaaatcgctagcaaatcgccggtggggtgagcgcaaaagcaaaagtgagaaggactgcatcgctgcatcgatggctacgagcgctaaccaaccgtgtaaatttcaatgcttttaatacagtacagccagatgaactctcgaaacatgagaaatgtattgcgtttttgtatgttatgcagcgctaatgctgctgttttaataaccaacatgcaagctcttaagttggtaacagcggcagaattgcaggtgtcaggcagtaacagcctgacacctgcaatccaggatttgctctggcactgcaggagcagtggcgcatttgattgctaaccgcctgggcaccatgcccgagattcatgatgtgcctgcttttttttagccattcccagcttgtaggcactctgtcggccgatgtcgacaccgtcatggtatggttccccattacctgacctgtgcataagtgagagggaaaatgctttgattggctatatatcgatgatttggtgattacaacctcgcagtcatctacaggcgtccccgggctagtcccggctgtatattttaatgtacctcgcacaggaagtacaacaagctctcaagatttgcgcgctacttctgcaaacatattgatttagatgagtgtacagcgatacctactgcgacaagtggcacgttgcgggaatacctccaccttattcttgagctaatcttgtagtaagtcagtacatactcatttatgttcagaccgcgtgaatcttgttgattcgcaaacatcataagtaccggcatcctccgctctttactgacgttcggttattactgacaattgattatagccaatcaaaataccttatcgtgtgcctccacttgttactgacaacacaaaaatgggcaaggggcagtcatttcccaatcgccaagatgccacctgcccgcagacgctccgcaattgcggtggcagagaagctcgcggtgctcgatgcctgggcacagtgcggcgacatcatcactgttatcaacgccttctacagcggcctagatgagtttccgcatgaacagcggcgcaaacagcttaagtgaaggaaggctggcgttccgttcaagctaagtagtgccgcctgacagatcgctcattgccagttgggttgagcgagcgtgggcggagttaagcgagaagacagtcaaggctgggtacaagaagtcaaggctcgcagtacaggaagtagacgttgtagctagtaaggtgatcgcggagctttctagtctgagcctggtagatcatcgcattggggctgtggccgacgagcatgacaccatcgagagtagctcggtctgcgacgaacttctcgagtaaacaacgaacctttttctgtttcacaatgcgcggcagacatcacttttttacccatttattgaagccaagatgtagtcaaacatggttgtcagtaaagaacggaggatgccggtaccactgtggcgaataggccggggacgcctgtatcaacaccgcgaaagatggatgttttgtgtagttcaccaatccttttgatccaccatctgggattagtatgcactcgatctacgttcaatgtcgtaagttccggcgtacttcgcgtcgttttcgactcttatgtggtaagtgttccccccatagatctctacaatctcatatgtctgatggggcttcccttgttgcggacagggcgcgccaatacaaactcgtagttacttttttcgtcgtaagttacgacgtacagtaccgtagattacgtgtttcggagcctaaatcccgggacccaaggggttaagaaagagagacccggttttcgaaagttacaagttttttgccgggaccaagtacaggtcttcgacctgtgaatttgacaagactttatcctgagggaagcaatgtcagcagcagcagtatgatttggggctaggtacttgtatacatcaacttttttcctatttattgtcagcaatacaggactcattttatattgattgaaatctattctaacatttgaaaaccaaattgctactgaatcgatctgacctgaagtctccatccacacataacgattcggttggaggccaagaacctgggaccaggctaggaatttcctggtgccatcatttcgcttttcaccgtgtcggaggtagatgaccaagcagcgaagtaagaaagtggcccagataccgttcgacggtgtccaccaaggcagcgaacagcacgttaagtggtttctgccaatatatcggcaactcctgttggcacgagagatttactgcgacgtgcggttactgttcaagagccccgctgagaacggtgcgtttgttcaagcgtgggaattgctcatggataccaatccgggggatgacatggcgaggacctataaagagttggttctcaaggacggaggcgagccactgcggaagaaactggtcgtcaagccaagatagaaatccttgaagtctgccacacagcagaagtgggaaaaagccgagggagaagtcaagatgctaaaacaagcggaggaggcgcttgcagcacgtatgaagtgcgaggtggtggctgccctatgcggtgcacctattgggtcccttcattacaggctgaagcgggatcgagaccgaacgactgtgttccccaacgagtccaaagtgagcaacagcaatggtgacgacgaacttgaatatataccaaacctgagcgcggaagagcattccaaggaggacgagaaaggcctgatcgtgtcaccaccatcagaggtaaacatctcctttacgggcggtagaacgacaggagaagagggggccagaacaacaccaagaacatgacgatgtgtcggtgacctcagacgaacaaaatcgtggtttgtacgagcttttggcgcctactcgtgccgtttacgatggagttcgggcttgatttcaagaccgtaagctgtttctcctagtttggcgagttttaatgacggaatggaatggtggagacgaattggtcgagatggctaggggttgctgtggggtgaatgatccagaacgcgacacagccgatatcacacgcctggtagttgagaagacacgactgaagtgggaaagaatcgcccaaatgaacgcggagcaacagcgctactgccatgggggcgtcatgtcaaaatcaacgaaagacgcgcagagggctgagctgtggcgagtggcagggagggcgctggtggaggcggagactagcggtataatcctcgctgcaaaagtagccgggatcaagcgaggcgcgaggcatactgcaaggtcgtgcaggagagatcttgaacgggcaccataatctggagcagttcaagcgaattcacgaagctcgcgccgacacaagctgcatttcggtggcggcagaatcagcgcgcgttgatgatgacgagtatgaagagaaagtaccagtgccaccgccaccaccatcgcctgcaaagtacgcttcataggaaccgcgaagatttaaagcgcaatcgacaagaacacacggcaggcgaggtgctctcaggtaagacgaagagggtgaaacgttcgcacagattgatccagaacgacgacaacactggcatcgtgcctgagaaacatcagggcaagcatccccactgcaacgctgctgcacaaggactttcggtcctgaaaaagaggaaagttcgcggttccagtgtccttctcacgtcccagcagtaggaacgtggcgaccgaaaagaagcttaacgcaacttactaccgctaggatgaaggaggtgggtgggtgcatgtggtggttcccgacgcaatcaaaggttattctaacgtcgattttgccgtgttgaacgaaagcattaaaacatttaagatccagagcaagattttgactgcataatatggtatcaatacagtctataagatagattgtattgatcatgaacatttcctacgctaacgaggttttgtcgccagtgcatgcttttgaagaacgtcggcgcaaatcccgtagctcgccacaccgacctggagtagaattataaattgtctgactggggccagccatagtacctattgcatgacgttgtgttgggctgtaccataagtccatcaatcctttccggattactttagccgtccttgggtccatattcaatcctggttttggtggcgccggcaggccaaaaaatatacacacaccgtgagcattattatcttcatcaaaaattcgcaaaacaatcgcgagactatcggaatagcgtctctccatggcgtctctgaaaagaaaacatcaacgaaatatccaaatactcagtgagggggtggggggatatgacgtctttgctatcaaaagattggggaagttgcccgttgcagttccctgtatgaactcctgcaaccggcttaatgcccaaaagtaaccgtaagatatatccagtagaagtattacctgtattgcccggtgttgtgttataccataatttcctccccgggaatgctcttctcgtggtcgcccaaaccgttcacttctgaattttcaagctacaacgccaaacataacaatgcgtcagaccgtcttcccccgctcctagtcgccctcatcgggtgttacagcaacctcgtgcaagctgatcatgccattggaatggctatgacgtgctcgcagcgcacccccaacaacaaccccactacgaaccggagccctcgaactagtgcgctggcgacaatggagaccacaaaaacgacaacagacgcaacagacgcggaagatgaatagagaatgttcaaattcccagtgcacagcaagtgtagatatcaatttcggaagaatccgacagcttcgatcagcactttgcgtaaagactccaaattcgtcgagcaacctgagaatctgcaaaaacatccccaaagaaaattgaaaacgtcaaggaaatcccagttgtccggaaaaaaactcagcaggttgcagagcgatcgcgagctgataacgaagctgcggaaaagcgaccctgaatagagcaccaaggaagtgtccacgtacctgagtaggggaatacctgaagggtccgctgcgaaggtgaatgctgggatgttcttcctttttcgtaatgttcggtgtcatcatcggtattgcgtcagtagcatcagatgcaggtaaaacaaaatgtgttggatcactcgagctctcgagtggcttccactgcgtcagtgataatccgtggtataccaatggacatttttcaactgtaaatcaggagttcgtgcctgccagaacaaaaacaaatagtatataagtagtcatgttctgtgcagtttatttttcacgaggttgcagagttccgcgctctcggcattgtacggagccgagaccacagcactagtggggtcagaggttaggataattgaccaaatcatggtattagtattactggccctactggaggtctgatataaatatcggttatacaatactttcgtatgaacgcaaacttccctttgcatttagatagaagtttctgttaaggtcgtggtagacgttgtcacgggccctcgcgcgggtcccgcggtccgacgggtatcgaatagcaccgcggaggacgtatagagagtggaagtgcgcgagcatgcactgaaatagcgtctgcgcgggttcggaggggcttctggaagtataaccgtaaaatattactggtataaccaattccgagtagtagtattacttcaattatccttatacattcgcccaaaaaaacgagtataagtattaataccgaaattgtattactgagtaatacaatactttgagttatcttaacctctgagtgggatgtttagcctccataaaacgaaaaaatgaaaattaccacaccagtagagggtaaccctccatcagatctaccgtagacaaataaaaggaccaagcatttcgccaattgctgtcgtaaaaccacacgtaaatatggtgggtaattcatggattcaagccggttagtgcatgcaggaaactgtaacttgtgtttatagaccgaaaaattgctgtcagaattgcaaattgctactgtagaaactgtaattatatcccttcttctaattgtgtcccaccccatgaaaatcgatggggatttgtgaaagtgccccaccctcaaataaagccccaccccagtctttttctgaaaaaaatgaatttaattccgaattctctggattttatccatagttgttagggcgatacgactgcaggtgcaaatcactttaaaatgcatgctccgctatcggatataaacggacgaatcattaacgtatcggatcgtttaataaacgcttggataatatattatccagcggtgtgttgcttgagtcttttagggtcgacatttgcgtgacaggatcgatcggatgtcgctcgaccatgaccaaacaaaactacagtttgtttgcagtaaatttatgttcaacaaggttacatcggtgtcgccacgttcaagtcatgggacgacacccacgaacacccaagacttcaatttaaagtcgtgggtgtcgttgaagtcttcaaacgacgctggtctcgtttcaaccattctgctcgtgctcgtttcacgcctgaaacaaaccaaaccaaccaaagtgcgaacttaaggtaggtcttcacaggcccatctcttagtcccttcatgaacgtgacgaccttggtcgcctcgtcgatcggattggtcacaaagaataagggcgtgaccccaacagattagttgcgtgacttaacgcgtatactgtccatcgttacggtataacagaaatggcagtaatcctcgtcttcccttgggctcttttcgttctgtggcatcggcacatgtgcatgcagcttagcctgccgcaggctaaactcctcctgcattgcaagagtaattgcagcttcgagagtacacagcttctgaagaaggacgccgagtgggtttggactgctgagtgtctagtgtactccacaaacatgttcacaattttcacaatacacgaactctttgattgtgctgctcgcaaacgcgttcggagtcttctgccctatcgcccaggagcaaataattggataggaatgccaaacgggtagtcatacagcggatattctgtccaaaaccgatcttaaagttgaacaccacaccataggggttaaatttcaaatgttttgtggtgtaggaaacaccagatttcgcgcgaccaactcggctggagtggcacagtgtaccggtagccgagctcagctgagttcaccagcttatcctgacaccttatccggctcagccgagttcgaagaattatccggatagcttatctggaccagccgagtttaagcgtcgccgagctcagcgaagagtcggtcgagaaccgcccactttcatttgttatttgtataggaatataggaatagtggaggcgccccttcagggtgcccgaccgagataacaaacaatagagcagaattttctaggcctaaagcacgtgtacacgttccggtaagtccttgcacggggccggattatgtctgctgccggtacccgagaggcatagcttgtagggtactcggctggcagcgccaagagattaaggtcggcccgggttgggcgcgtgtctcgccaagcgcgaaggaaaagtctcgccccactgcgagccggtgttcccgcacgtcccgggcactgattcctgagtcgagaagcctttgctctcggcgacctgtaaaagcgctccgtgcgccgtcgtccatcctttggtggacggcacagggatgagtgaacggaggccgtcgaactcggcggttctccggaggagtgatcttggttggcaggtcttggcgagaggcgaggcacccgctgtcccgattgggccgaaccgctcgggggcaacccggcgcaggccaacaaagccgaccagctcggctattgttgtgtttgtagccaagttaccacaactgacgattttgtgtgtactgctataccacatttcatatcacaatattaaagtgtgtacaacaacttaccattatcagtgattgctgttgaatttattgagtaagtagactttttaacgcaaattgtatttggtcatccgtacatgtagtgcccccactccctttaatagtggctcccttctaataatgccccaggggcactgctgcaatatcccacggggtataattacagtttttacagtactttagcttgctcgggaaatgacatgcgatttaggagctttcttcctgtgcaaatggcaatacctcgtttatttatcaagggtgtcaggataatatcagggcaaagagagaatatctccacttttccttcatagctacagagcacacattctggctgttgtaaatggtccttctggcctagcgaccgctttctgtttcatgccaatcctcgtactcggttgctcccgccggaacagagctgcagcaatcgatttatagttttctcattcaatgattggagcaactaatatgcctatacaagcagtccaactaattctagtgctgccttcttgtttccgcatgagtagttcgtaatagttagcgttaccatagtatagcctttggactttggacttcactgctcccttgccaaggatctatcagtgtactgaccgataccttgaattaggttatctatgaataacttaatccaaatgactcttcagtacattgtttcgtacgttagcggagactttttacggagcttcctgacctctcatatgttttttacggcgggcaccagtgtccgttaccacatttaaccggagttcagccaccccttcaaaagggttccacggtccatgtgcatattgtgcctttcacttattctgtcatgataattctggtataactctaatcccttatcgaccttaattatgctcgagttagctaatttccatgttaattccgggtcgcccattcgtggccgaattaggagcggcgatggtgaggccgagttaaggcggaataagctaatccagtctgcgttaggcggaaacagagcgattggcggtttcctacccgccaatccatgccattctgctcgtatctccgtctattggctcttaaatgctgatcgcggatgttaggggaagcgctcacaatcttaggcagaattagcactaaataagcgttgctcgcccttttatgactctaattccgcctgaattaacaactcacccgccaaaatacgtgaaaggcgcaataaatcgtcggtcgtcaactcttatcttaaacttcaacgattaacgcaatcgtttgtttgctgatacaaacggggcgatctccggttcgataaaaagttgacctcagtttaataacttgttataccttcgaacaaggtaacatagtgttactaacatttgaagggtcgagttcgtgtgttctataaaagaggtaaaattcgatcgaaatcgcccccgggcaggctatgatagttcatttgccctaccccattctcaattgtaatacaggggttcataaattggggtaaaaagtagggtaaaaagtcttttatgcatatttcattaaaaggggggcaatgccccaactaatattgtgcctttcacctattttgacgggtgagctgttaaatcaggcggaattagatccataaaaggacgagcaacgcttatttagtgttaattccgcctatgatcgtgagtgcttcccctaacccacgcgatcagcatttgcgagctaatcgacggagatacgagcagaatggcatggattggcgggtaggaaaccgccaatcgctctgtttccgtctaacgcaggctggattagcttattccgccttaactcggcctcaccatcgccgctcctaattcgaccgcggtgggacgacccggaattaacatggaaattagctaactcagggcataattagagccgagaagggattagaattattgcagaattatcatggcagaataagtgaaaggcacagccctcagctcgcaggaaaggtctagcgcagtgaaaagagtcggagtaggtcaaacgtttatcatgttacctgttggtatctggttgccgcagaagcgtaatacatgtaatgttaccacagcgtaaatgtgcagtacctgtacgtacttcccagtgtcttgttgtatactagagcttcataatatcctcgaaaatattctctcgtggtcgcccaaaccgttcagtcctcaatttacaagttgccagacgcacacaaaacgatgcatcggtcgtctttctcctgctcctagtcccttcatcgggtgctacggcactctcgtgcaagctgaccgtactgctgggatgattacaacggacttggtccgaactcccactggcagctccaggggtctccgaagtagcgcggagctcacggaggcaactaccgacgctgaagctgaagaagaagagcgatggctcaaaatcccaaagctcagcaagctgaagaacatattccggaagaacccgacgacccccatcagaaccttgcgcaaggaccccaagatcgtcaagcaagtcgagaccttgcaaaagaatccccaagtcatgaaggaagtcgaaaacgtcaaggaaatcccggctgtccagaaaaatctcagcgggctgcagagcaatcccgagatgatgacgactttgcgggcgcccccgaaaagagcattagggaggcatcctcgttcctgagtaggggaatgtctgcagattccaaggcgaaggggaaaattgcgttagcccttctgggctttttggtaatgttcggtactgtcgtcggtgttgcgtcgctggtatcagggtaagaagtaaatgcgttggatcactcgagctcttgggtggcttcaactgcgtgatacacgtacatcagcatgtagtcttatcttttttttatattttatcggagcctacttcgctagtgcaattactgaggctcccagtgctgtctccaactgaacacgcatgtgctgattgccgcttcttgccgctaacttacaacacactcaatgttagccctcggttgttatcagtcgacagtctttcctccattcctccggcgaggacgaggatagctcgctcagctgtaacagagcccctacccgtctctgacaacaccaatacccggaacgattggcagatacagatactgtaaccagtcactttcactgcattcgtcacgatggacgagttgctagcgagcgagctgtcggccgagacgttggccgcgctgcaggcgcatctgctggagcgccaccaggaggaggacgcccccgtgtcggaggatttccgcctctcgcagttgtacggtagaacgactgtatagattgatatacttgctctacttactgactgttatattggtgcattggtattgtagctggtacgatgagaagactggccgtgcactggcccaggaggccatcgaccacagcagcagcgagctgcgcatcgcgtttgtgagcacgcccgcggcctaccgcgacttcctcaagatccagagcgaggagcccgacgaggccaagcgcgcggccatgggggagaacgtctacatcttcgagtacgaccggcggttcggcgagaagtacggcgaccgcttctgcttctacgactacaacgcgcccacggagctgccggacaagttccaccacttcttcgactacgtgctcatggagccgccccacctgagcccggactgcctcgagaagttctcggacaccatgcgctggctcgccaggaacgtcgagcaagtgcccggcaagaaggaccgagtggtgaacccctccaccttcatcaactgtacgtgtgctctacctacctatttgagtgggtactcgaactacctaattattaactctgcctccttgttcgtggttgcagcccagttgctgcgcaaggagatgaaggcggacctgggcttcacccccacgggcttctacccgagcttcgagtccaagctgtccaaccacctcctcacatacaccaactacgagtccgagcgcttcggcccgtgccaggagcccgacgacgagtagaagtagaagaatgtagccatgtatgtttgagctacccgtctctgaccaacacgaacctctgttctaccccgaacgattggttgataccgtaccatacgcattttgtcatttgctctacctgcgcacaccatggacgccctcctctccagcgagctctcggccgacacgttggcggcgctgcaggcgcatctccagacgcagcaggcgcaggaggaagtgtccgaagacttccgtctttcgcagttgtgcgttacacccgttctacctcaattctaccttattattgttaggtgctgacgatgtatgtgcatccagttggtacgatgaccgcactggccgcgcactggcccaggaggccattgaccacagcgaggagatgcgcatcgccttcgtgagcacgccggcagcctaccgtgacttcctcaagattcaggaggagagcgactcccccatcaatggggacaacgtctacctgttcgagttcgaccgccgcttcgacgagaagtacagcggccacttcgtgttctacgactacaacgagtccaccaacctgcccagcaagttccaccacttcttcgactacgtgctggtggacccgccctacctggtagagtagagctatctatcgcctgcgttttgagatgtggcttctactaacgaggtatgatgttgtagaacaccaactgcatgggtaagttcgcggagacgatgcgctggctgtcgaaggacgtgcagcccgtggccggcaagaaggacaagatcctcaacccgtgcaccttcatcactggtaccgtcacgacagcgagattcgttgtcaattgtgtgcacttcttctaacgtgcatttttctctgtcttgtggctcgatcgttgtagcgcgcatgcttcgcaaagatatttatgccgacctgggcttcacgccgtcgggctttgtcccgacgttcgagtccaagctctcgaatcagttcctgacgtacaccaactaccgctcggagcgcttcggcgagagcacggaggacttcggcacttcggacgacgaggagtagattctgcattttgctctccgataatgagcataatgaacgctgctgtttttgaagtgcacgtgtgttggccatgccagcaactgtatcaaagtaccaaaggtaggcgttagagcccattatcggagtttcgttttgatctttgcgccgattcttgtggatcgaatactaccatacaatccctgctcgtagcaaggcatggagtcggctaaaagcgcgaggactcgtggacatctccagcataacgcagcaacatgcgcattgcgcgcttcccaacgtaccggtactattgatttcctgcgacgtgtgcaggcttgaacaacgtaggaggaggccttcaacgtcacatcattggtctccgcttttgatgcggtttctaccaatagccgtggcccagtcagccgcggccacccatctgatggccggctgcggcattcctgcatttatctaatttatctatcgcgcttctggccggccgcgcgcgtattacttgtactagtatcagagacatggagcaggcggcgtcgggcccgtgggacgcgctgctgtggagcctgctggccgtggacaacgcggcccgcaacgcggccgaggcgcagttcgccacgctcaagcagagcgcctgcagcgacgaggtgctgctcggcctggtgcgcgtggtgcactcggccagcccggacgacgtgcgcgcgctggccgccgtgctgctgcggcgcgtgctgctgcgcgacgccgtgtcgctctggccgcgcgcgtcggacgcggcccgggccacggtcaagcacgagctgctggccgtgctcgaggccggcgagaagaaccgcggcatccgccgcaaggtgtgcgacacggtgggcgagctggccagcagcatcctggaggacggccagtgggacgacctgctgcccaagctgctgcagtggagcaacgcgcccatggtgacgctgcgcgaggccgcgctgcgcgtgctggagatggtggccatcttcctggccgctcagatgacgcaggacgctgaggccacggctacattggacgtcacggtgctgcagaccatgaccaagggcctggccgaccgcgagggccgcgtggccctgaacgcgctgcgcgcgctgggcatgctgctgcttaatctggacgcgctggaccaagtgccgcggcccgagctgctggccagcgccgtgccccttgtgctggccgcgctgcactcgctgcttgtgacccaccagttcgatgaggtgatggaggcgctggaggtgctcattgaggtggccgagccccacgcggccttcttcaagccgtgcctgcgcgagttcgtggagaccatggtgcagatcgccgatgccccgcgtgacgagaacgacgacaatgctatgcccgacggatgcagacaactggccatggagttcctggtctcgctggcggagcaggctccttcgcgctgccggagactgcccaagaacatgttcgtggagacggtgtaccctgtggctttcaagatgatgctggagctgcaggacttggacacttgggacgtggccaattgcgaggatgaacagtctgctggcggccaaggtatcgaccaggagatctccaactttgacgtgggctccgaggctctcgagcggttagtgggtgcgctgggcgccaagcgctcgctgcccacgtgcttcgcactgattcaggaatatgctgctcgctctgacaactgggtgagccgccacgccgccttggtgggcctttgccagattctggacgtactcgacaacgaaaacttggacgctatcgtgcgtcaccttctggcccaggctaatgacccgcacccgcgcgtgtgctgcacggccgtagacgtgatcggccagctgtctgtcgaccaggccccgcagttccaggaagcttaccactcccaggcgctcactgtgctggcacactacctcgaagactttaacaagccgcgtctgcaggctcatgctgctaccgcgcttcgccagttcatcgacatgtgcccgcccgagctcctcacgccgtatctggacaagatgcttcaccagttgttcgcgttgctgcagcacggccagtcaatggccccgggtaccaaccaagcgcctactcaggtcttcatcgccacgcgcgttgtgcaagagcaagctatcacggcgatctcgtcggtggctacggtggctggtgcttcgttcagcaactactacgcggctgtgatgccccctctccagcaaattctcatgagctgtctccaagagagcatgttggctgcggccgcatcgccggcagtgctcaagccgcagtccaacgcgcccagttcttttacgcttggaggtatcacgctcgagtgcttgagtcttatcggccaggctgtgggtaaggaagttttctctcgcgacgcgcccgctatcctgaaggtgatggcggaaatgcaggcgactccgtccatcgtaggcaacgagttgatccgcacgtatctgctgcaagcctgggcccgatgctgcacgtgtctcggccgtgatttcgcgccgtacctgccgctcgttatgccgacgcttctcgaggccgctacccagcaggcggagttcgaggtggacccttctaccctgtctagtgacgacgacgacgacgaaagcggtggctctacggacagcgaagacatccagcttgcgcaggtcaacgacaagtgcctcagcatccggacatccatcctggaagagaaggccactgcgtgccagcttctggccggtatggtgacggacctggaagacgccttcttcccgtacgctgaacaggtgacgcaggtgctggccccgctgcttacggagtcggtgcactcggacatccgtgcctcggccattcgtgctatgcctgctcttgttaagtgcgtggccatttcgaccgcggcgccagcgtcgaaggatcacggcgaggctgctatcaagcagatggtggactttgctctcggtcgcctggtgaatgccctgacgtcggagccggaagtggatttggttgtgagcatcatgcagagtatgattagctgcctcaacgatgcgcgtgagcttcacccgacactggagcttaacgaggcccaactgcgtgagctggtgcatggtctgcttgtggtgctgggtgacagcttccagcgccgcgcaatgcggagaggtggcgcgggtagcgacgacatggaggccggcgaggcggaggaagaagaggacgatgacgcctcgcagtcgagtgagaaccaagtggcggaacaggagctccagttcgtgttggccgagtgcatcggtactctggccaagactcacggtggcgcgttcttcccggtgttcatgacgcttctgtgggacaaggtggctgctctggctgctcctgggtgcctggtggaagaccgtcgacttgcgctgttcgttattgatgatgtgttggagcactgcggtggacccgcgatgcgtcaactcgatgtcttcctgcctgtcctggaaagcgcgctgcgtgaagtgactgagcctggacttgtgcaggccgctgccttcggcgtgggcgtgtgcgcctcccagggcggtgatgccttcgctcctcgcgccgagcagtgcttgcagttgctgcacaacgtggtcgctcacccgcgggcccacagcagcccggagcagcgcaacgcgaccgacaacgccgtggcagcgctgggcaagttctgcgagttccaggggggcgctgtggatgccgctacgctgttccctcagtggctggagttgcttccgctccgtggtgacctggaagagtctctggctgtatcacgccggctgtgccgctacgtcaacgacaggcatcctctcgttctcggcgcgccggactaccggcatctaggcaaggttgtcgccgttctagccgcagtggccgaggagaagttcctgcgcaagatgagcaaggcagtcggcacgaaggaggcgtcgggtctgcgtcaggagctgtcgaccacactcactggcctccgtgccacggtaccggaacccgtcatgggccaagcttgggcctccctccctgccccgcagcaggcggcgttgcacgcgctgttcgcgtaggtgaattgcaaccacgacgtggaatgaagtaaaagaaggattttcataggtaagtaggtaatagtagttgactacatgagttgctctcgtggttcaagcattattatctgtagtggtggattcagggctcaaccattaccggtactagctcctagcggaggtgtggccccattccgacctttatccagcagcggagctggggaatcgcgtgacatccctcgagcttcttgtacgaggtggaagcggtgacgaaggaaggccatctccagctccccgcgcagcatttcggccggataatcttcgtgaacggtggcccacgtccccacaagggccatgaaaatccgcgagtccaggaagtcgggcaccaccacgttgcgcatgtggtcgtagcactcgttctcaacttcatcgaaggttgtacggcaagccacgtccaacgaagcttctacgcgcttacgaagtcccggggccagcggaatgggcgatcgcgggttgttcggattcagatacttgacgtagattttcttggccgaccgaagcacgatctggtagctcggaagtcgtcgatagtgctcgatctcctcccaaagcatgagattttccgagcaatgctggaaatccaagaacttgcggaaggcctgcatgcagcctggatacgtcaagaagacgtccaagtggcaaagttccagctttccggctttcgcggcctggtccacagtcgcaaggtgtgcatctgcgggtgttgccttgctgtctcgtcgcagttccttatagtaattcgacttgacgaagcgcggcagtgagtcctgcagcatgccatgtcgaaccctgttggcgatcttcttgaacatatccacgctcggattcgagagccgcacgtagatttcgtctcgcatcgttgtgctcatatcgacttgaagtcgggcgctgggcatcatatacttgcgataaatcttcttggccgagtgttggaggaactcgatgcccggtagcagcttaaagtcctccacttcctcgcagaacgcaagtaaagagtcgacacctcgtcgagtcatgaacaacttgaagtatttcttggcaaatgggtcgcccagcaacaaagtgagaacttgctgagggctgagcgtctgctcctcctccatcttttgaatggacttgcgtcgcgacattcctttgatagactcagggaaggagatggggatcagcttctccacggggtagtgcatggcggtgtcgatgagctggaactcggccagcgcgtctagtttctgatgcactgcctcgctctcttcgaaccgattgccgcgacgtattagctgcttggtgtcgggtttaacgactttcgagtggtcgagatactcctgcgagcgacagaaacccggccacatatcttcgcttatgcggtggaacacggtgatctgagcctcgtagaacagcttgggcaccaaagctcctttcgtgtccacgacttcttggatttctcgaagtgcgccattctcctctagcccagtgatgtagttcttcgacgacggggtgcagtatcggtcgtagatcctccgtgtcttgttcactacgaacgataagttcggcagccgcttgcagtcctcgacctccaggtagaacagcagattttccagcgctaaggcctccatgcagaacgtcttgaggaagcgtaacttggctggatgggctaaaatccccattagcgaataatcttcagcttcttcagacccgtcagctgtgttggacccgccattacctgaacctgcttcgccgctaggagctccgtttggaataatcggagcacagaagtcctgcatcttcttgaacagtttactatcccgaaagcgagggtaaaccgacttctccaacgcgatgtaacaaatctgctgcgctccggagtagataccagcggagatgttgtctccttccagagctttctcgatctcttgcatcatgtgagcagtgacgcacaccggcgaaggcgcatccggggacaagaatttgtcgtaaattttccgtagacgacggtgtgtgtaggaatgtgatggcaagtgctgcagctcgtcaatttcgacccagaaccgcagcatgtcgacaccgttcgggaccttgttcacttctgcgtacttgaggatcatcttgagcgtcgcggggtcggtcaacacgtcggtagtgaatacgggggcaaggttctggaccagatcaagtgcagctcgagaagtgcccactgctcggccgaaccctttttcaccggacacagggagaataccgctcgctgttctctcgtcggcatgatgagcgacttcctcgtcaagtggggccttcggagacagagcgatattgggctcgatgatcaagtcattgaagtccggtgatgtcgtcacagaggctaaagtagctgcatctagaagtgaagttgaacgcgtactagcgtctggctgtggctagaagataatgagaagtaacaggtgaggtttcagctagcttgaagcgcacggaagtaaatggacctacctcgtctagggtatcaccagtatttaccgcttccgagtcgttcataggttggacttcggtctccgaactgaccggttgggaatcttcaagcggaggctttgggtcaagctgtgtcccggacgctaaacgctgagcaacgatgtgacggaggctcgagaaaatctcctcctccgagtcgcctgcagccaagcgacgttcgtattcatcctttgtctgcagcaacatttcgttaacaaactaatagcatcaaccaaatgccagcgcactcgggcaacggacctctctaaagatcgtcgatgcgtccggatcgtccacagacgcagcagctcccatggccgcacactggttcccggtcactcgacttcgccacttcctggccgtagacgacgtagctggctagacgtcgagcgcttgagcgtgggaagtgggtaggttgggccaagtgctgaaggcgcagttgaagtactccaaacgtttgtcgagctgtgctaattacggcgcgacaagactcgcgctgcaccaaactcctccatttatagcggagtttggagagggattcgcccttcagcatcatcagtgttgtctgcaaatgagcccgccgaacctgttgggtagtttggactgctaacttgaatcggcacttgaaaccatctcgagttccttgataagcatattcatttcatcacaccagctcctattcgataaaaataataagtgttatattacctacagaatgggtggtctacttcttgagacgtttgaaggctgcgttgtacttctgatagagcaaatagggtaccccatctttcggtgttccttgcacgcccagcagataaaatatttccacaggatcctttctagacgacagccaaccctcgagccgctgggagattaaatcttttgcgagtctcttggtactgggaacatcctccgctgcgatgagaagcttcgacaacctgtctcctttgtagttgttctccaactgcgagagcaaactcacgttcactgttgggtttttgtcgctataagcgatcaaatacttcagccagaccgtgaaaagtggactttcaagcagcttattccctgtcaggtggagattcaacgacgcgaagaccagctccggggccaacttctccacagaccagctccgcaacaactcgtcgtacattcttttcgccagtcttgctgtagttgggttcttgctccccgccaggatcatctttgcgaggtcatcggccttgtagagtttcaacaatgccgggatcgcagtcttccttgtgccgaaatattttctgttgaactcgtccgtgtacttgatccacgcgataaatagcgggttgctaagcagcgcgactccatccttgcccttaatcctgagtagctcaaatactctagcaggctcctttgcagtttcaacgtcgacacccaaccagaacttggtctgctcggcttggattcgaaccgcgacactctccatgctcgggatgttctttgccttgatgagcatctgcaccagcgtcggctcgtcgtagcgcttctgcaagaccgcgaacaacgtcttctccgtgttggggttggccttcccgaagtcgtccacgaacttgagccaagtgtttacctgaggctgcgtgaagagttgagctccggacttgtcgagtttcagcaaggtgaagacgtcgatcgggtacatttcgtcggcgatccaccgccggatctgctcgttctccagtcgcttggccatcgtcgcagtacttggcacgcgcttggccgactcgatcatcttggacacgccgtccgctccgtagtgggccgtgagcgtggcgagcaaactcgtcttcttggtgctgtcctcgttgacgagcttcatgtagctgagccacgtgttgagcagcgggctggccaggagatcgtccgctgccttgtcgagtgccaacagagcgaatacctccttggtggtcttcatgtccgccagccagctctggagctgctcggcctgcacccgtttggcgatgtcctcggtactcgggaccttcttggccgcctcgatgagcttggccaggccgtcgtcgccgtatttggccgtgagggtggcgatcagactgaccttccgggtcgggttttcttcgttgaagagcttgatgtagttgatccaggcgttcaagttgaggttggccaggaggtcgtcggcggccttgtcgagcgtcaggagcttgaagacgtcgtccgtgctctcgcctctcttgagccactcccggagcttctccacggagactgtggacttgaccgagttggcgactgcttcgagaccggacacggggaggcctctttcttcgtcatccaggcttgagagcttatgaaccctcagcagcctcgttgtggggagatttcgctggctaacgacggtcgaatgcactaaacgttggatgtcggttgtagttagtagagatgctggtgtcgccgaggaaacgtcggcctgcgccaggagtgcagtgataatctgcagcaaaactccgtggcgcaacatgaggggcgcagcacttggtgatgtggcttagcctttgcctttgtgattgcgaactggttatggatttatagaacagaaaatcaaaaaccgggccgttaatcgttagattgctacaccccaaatggttatcactggatgggaggggtgcagagcctggcagaacatcgccccgagtgcgacgcactccatgaatacttcaagaggaagtttagtatttggctactcaccctggcacaagtattaatacaagcgttgtgagaggtgcgtggtacacttgtttcatgtcaataaacacgggttttatttatcaatccaaaatgtttacgaacgattattttaatagatattattcgtttacatttttcatgtttacatttattttttaataattgtttacgaacaattatgagtagcaataatagtattaacggataatgtcaaatagtatacggtgtactattcctatagattacatcccacaagatactctatttggcacagtaaactaagtatccagttgcattggtttaacctccaaatatctaaaatttcgattttattcgaaacgtttcgtataaatagcaatccatttttttaagttttgttatgatgtgtttaaatgctaatttgattttagtgattcgaagccaagcacgttattgtggaaaccgattagattgtctaattgggatacaaatcgattgattaagcttaatcgggtctgatttgctaaatccgacctcctaattagatcgacagactaagatttgtactctgatttgactgagcggtcagttgcctacaacgccatgtggcaagctgatttagctgctccacggcttacaaagcccgggacggctgatttgcatgctaatcagcccgaatgtccgacacccacacggcattcggtggccgatttaacgtaaaaccgacaaacgctaatgctgacgagaaatgacagcgcaaatacatgacttcagaacttgataaatagaatgcagtacacatcgaagctcacagaagcgtatttaatgcacgcgatgctatttctcgttagtaggtacgcgaatcactcagctcgtggcggtaagtggtcgctcgtcgtatttctggcgggtaatgatgcaacccccattttattaaccttacaccgatttatacccttaccaatgccatatgaaatcataaggatccccgatttagtaccagtcaaatctctcatgaacgctgctttatcagctaatccgctcgggcaatctaatcggtttccacaataatactaatttaaaattcatcacatccagtttattttacaattattatgttaaaataagaatacctggtgttaaatcagcatttatggtaatttcacgctgaaatggtatactatttggtacggtataatataggcattataccttcacgatggtatatacagtttggaaaagtgctttattctgcattatccgttaaatattcatatacaatttggaaataattttgaaatatttctgggatagcagcaaccccggagggagtgctgtggccagcccaacacagattaattaggcggcacctcggtagctgaagccggaaaactggccccggtaactgaagtcgcttatgctctccatctcaaatccgaaacaagagagggatggaagacatctcgaaagtgagaccagtccgcacatcggtgatcagcgttgtcgggttgtcgccgcgcgcgttgagtccgtcagtggtgccaattcaactacatgtattacttggaggtaaggaagtacaacgcgcgttttcagtgctgcacttccagccgaacacacgcaccaagtacggcctgaacgatccgtatctcctcgcactcaagtgcatttagtactacgttgctaaggtggctactaaaggaataaagaaacaaaagtttgcgtccgctgaagatgataatggtcgatgggcgaaaggctcggaaacagcctgataggctctaagtcaatgtagcagatgctgcggctgcgaagcaggcgcaggaaatgtgtaatggaaacgcaaatttacataccacagatactgtaggtaacaggtaagtcgtagatttcagagcttcttcgtgcaatgcgcgcgactttgtttctcgttgaattgctgctttggcgatagcgatagtgacggcgcgaccgcggtgaagatgctcacactattaaataagagtttagctctcccagcctattcatagctctcgtacctaatatcaccactattatatgtcaaataggtatgtttagatgagcatccattattatatagcctattgatacaaaattttaggtactgtaaaaactgtaattatgccccgtggggtattgcagcagtacccccctgccaacctggcattatgacaaggggacactattttaatagtgccctttaaaaagggagtggggcaccaaaacaactagcgctaaaaagtctatttacagaatgaatttgacagtaatcactgacattggtaagttgacatacaaacctgaagattatgatgtgaaacatttggaatgttttgaggaaaaactcagaattagattcaattttccaaataaaaggttggggtggggctcaatttgagggtggggcactaacgcaagtccccagccaaagtcgtcaactttcatggggtggggcactattagagggagggggcataattacagtttttacagtagatgttagttagttctgaatatcattgtgcattgggaaagctatcgccgggaagtaattctgccggtattaccgtacacctaatatttttggagctaccttttatttgtaataaattgtaagaaaactctaactagtgatagttcagtaagagctacatcttgagatttgacatcggatcaggtgttttcttcttgaacggattccaatcattcagtagaacaaatttatcgggcttgtacggtacatgtaagcggcttgaagttttgaatagtgggcatgtatcgatgtaatagtgctggctgaaaagctgtatcgcccatgacaatttatcagtaatgccgtatgcactcgtatggatactttccaatgttcagacgagagcatacgtcgcttaacgaataattacattttaatttaaaaaaaagctagagcttagttgagagatgtacaccatagccccgaactctcctacgttccagttcttcgtcttcagtagtagttagagtttgtcctgcatcaataccgaattacctatgttatcaccttctttatgttatgccatacaccccctaattgaccaatcacaggcgtttcgggaagattggtgtgcactgcccttttatactgactcacttgatatttgtattgaaacgcgttttctatgcatttgcttggctagtagccagggcaccgaaatgtcgactcaatatctcttcgtgcgggagaattttcttcatccccaaaacgtacccaaagtcccctaaaatcccccaaaactttttggggactttcaataaaaactgtttgttactccccaaaatctcaattaaacgtcccccaaactgtccccccaaaataaataaatcatagtattgggtaactaaatattaggctaattttattccagaggcgcgatagcgcccgaccaacggaggtgagcggttgcgaggagcgtagccgcagcaaacccgcgcggggtgcccgcgaagcagggccgcgcggtatttgcgtaggcgggcccagcgacgagcattccagcgagccgaacactgcactcgccaggtgagaaaatctttttatcgcgagcgaagcgaacagcgggggcgccgaaggggcgcccagccaagcgcagcgcggctggttactctaagctagatatataatgggtcttagtaaaagttaggttcatggttcctaaatatgaggttttacgtttggggatttttggggttttggagtgcattttggggatgaagaaatggacgcctcttcgtgcccggttggttagggcatgttttttcatacaaaattcaaggctaaaatagcgtgtgcaaatccccggaatatgtgtgcaaaacatgcacttttggaagagatgacctccccgtctttttatcacgtatctataatattcgccaatgaaatagatgtcaaccgtccatcgcaccttttcgttgcacacgaaaaatgtactttttcagattaccatatcctgttgtttgatgtcttggatatcagctctttttctacgctctttttgtcgctgaatttgtctctttcttcgcttttcgatggtattttcagacaatatcagctctttttctacgctcttttgtcgctgaatttgtctctttcttcgcttttcgatggtattttcagatgttactaatactaactccacctggatgattagatactatatgcgaatgcaaatttgcattcctcgggcacgaagagatagagttcgctgaagtgtatggcattacataggtaattcggtacgtactgtacattgcaagtttccaaattactcgtctcaagctctccttccaagttggaagttccaactggtgttgtgtaccggcatccctttgtcatcacatactggttgttatgacatacaggctaatattagccaatcaatggcattttcacctgagcacttgttatggcatacaggcactcctcgcctaccaattacgctcagttgcggactgactcgggtggcctcgcgtgcctgacgcaaaggagaggaaggcattaaggcattcggtgacgtcgtccccggctgccgagaagctcaaagtacttgaccaagcatggcaatatcctcccctgccaccatcaacaatttctaccctgcactacccaaccaaagtcggcaaacgctcacacagagctggaagcgcggtcgcgccagcatcgagctgctgtacgcagagccaagcagagcagacaagcgaaaagcccagacggtgggtgtaggtaccgtattgacaccgcttggcaaggacagatcctcgctaaacttgctgcggacttgccagctaaaggcaatagagctcagggtgtcaaaatgtacaacgctggtcaaacaggcgtcttagcttattgtctatttggcgttgataaggcggtaggccaagatctgcgactgacgacttcgacgaagagttttgttgctagataaatagatgcacatgcttgccttgcattgctccaactgtagatcgagtttcagcttgtttgtgcggttagggtaaataggtgtaggtgggttgtatcatacacataccgtataatcgtagtcctaggcgacaacctccggacatggattatcaccatctggtcattacaactactaattatcaaattgaagctgccgttttattattcatcctcaacattatcgctgtcgctactgtgactgccgctaccggtatcatcgtccgagctgtcgtccccctcactgctaccactgtcgctaccgatatcgtcgtcagagtccatttctccttcagctaagttgtgcttttgcagtgacgcaataactgcgtctgtatcaacctcagcacaagcgtcaatagccggtgggcgtgtatccatcagtagccccgcgcgtgagaatccgctgacgattgtttcacgtgataacccgtcccaacttgacatgatccatttggtgatgtcccgccgcgacggcccgaccaaagcgaaaggcttctctttaaattcgtcccggagaatggcgactctgcgatcggcttcctgctggtcatactgcttgcgtgtgcttagaatatctgcagcgagcttgctccttttttgttgtcgggccttttctgcactgttgtacttcctaagttggtcgcgcagtgtttcaatccaaatcgatcgtagtaaacctttaaaaggtttattccacgaaatatctgctggttgacagacatacgtatactttggcggcaccttcagtaggacaacgttgagcgagacagcataatcttttacctccttcgtccaatgcgagctaaaatcgtcccacaacagcaagaccttgtcgtccgggttctcacggttggcaaaataaacctccaaaaaatttagagataaatccgcgttccaccacgcagttttgtttccaaagatccgacagggaaacgttttctgcagggttttcacttcacgccaaatggttgtaccgaacccatttctgatctcaccgttctcagcgcgtcttgcttccgtcttggcgtctgacgtcttgaatataatgaatgggtcgcactttacaccatccgaatctgctaaaagcataacagttgcacggtgtttatctttattagtgcatttgatccaaaccgtcttcgtgtcctttgctaagatagttttcttcggcacgtgttcaaaaaatacagctagaaagtatgttagacgtctagcattaaatcacaataagaaataaaacattttcgcacctgtttggtctgcgttgaatactttggtgcagttttgttcgacagcagtttgaagtaccaaggcgcgaaatgcttgggcagcctcggccgcgtcttgaggagtggtttggccttgacgcgttcttgtgcgcaacgacagtctgtgtcgcctcatgaacagcttcatccaagttgaggaggcggagaacttgtcgggagcaatatcagattccttagccacttccattgcctttgttttcagcatgaaccgggacacaggaattccttccttcataaatgtgttgatccaccggacgatctcttcttctgcctcgaggctcaagacggtgccatctccgagcttccgagagttaagatggcgtgctcggccagatgcacacgctgactgtattgaagcggaggcctttttccatttgctgatctgcttttcttttgctctgtggtcttttcgtgtgagctgcccgtagaagtgcagaatggtggccttgatggagttgcccttgttgagaaacttgaggacgtctcgcttgtcgccgtaggccacggcaactcgtttgtattgctttcggcgcttactggagcctgtgatgcacggtcgacccatgcttccttcccgcgctgaagcttaatgcgatactgctcttttagaaccaatggcgcgtaaaaataaccgatcccatatgaaaagtactgaccaatcgcaatggctagatgtagttgtcgccaatgactaaacgtcgccaaggactaaaactatacggtactagctgagcacctcgttcactgcgcttcctcgctgctaatttggggcgacactaaatattgtgccctacacaaaatttcgcgatgccccccccccccccccccagagccgatcgaaacattttcatacaagaaagcttaacagcctgatacgctcagaaaccatttaatttgtcgtcaaacttcatttatttgacctgtagtgctaggagtaagcgagtgtatcgagattgtgtatcaacacttcacacgcatgcctcatgcgcagacctctaccaatacgggaatttccgaatttttcctatatcctggcgatcactgacagaatatgggagaaattttgaaggttctacatcgtttgaagtgctttcttggagctatccgccagtgttgatagtctgttcgatttgctttatctgtaactgttgtgtactttgacgtagctgctttgtatagcaagctgcatgacggttttgcggtcctccgctgtctaatcttctgctgatcgattttgataacctgacattttcctttagtgcgctactacaccgttgccgagccctggaactctcggttaatcttacctccgcacaaaagtacgctgaaaatagttgtacttttgaaatcgaataacggtaggcaattgggtagcaacaggacaacaggaataatgtttatttcacagcgctttagcaacacttgcattagcaatcctttcgtggccagctggtatccccgagttgacgtgtattgcgccttttagtctttgtgccactttttgtttgagattgaggctctgtacttgcaagaggacggaacagtaggttggatcagtgcttattttattaatgtcttagggaaacctgacgagataccccttcgaaaactatttcatgagacgcccttcacggccagcactaaccatatgcccctcatttaaaattcgcctcataggaatgacatacaaagaaccactgaaagtggtgagaacgtaggcatactttatctctctgctggagattatacctctccttcactttcataaaagagctcgatagagcattttttaccatcaggtttgagtcaggtttgacatcaatatgacctttccgtgacttccttttcgagcttgcagctctctctctctctctctcggacataatgattcctcaacatgtactgatattattcatctcaagtcgaccacaccactaacaacgcagtatacatcaaaaagacatgtatcagcatttttgccgggaacttatcagcacttttagccgcgaacttctcatttttctagtgaatccgtaccagatgacaattgtataagtttccgcacaccacgattccggtttgtcggcgacaatcggtgtttaacgtgaaataatgctgtagataatagcaagtcatgaatacaataggtacaaactgcaataattgtgaacgcagcaagaatgattgccgccagcctccttgtcgctccataactcaaagtctaatagaactaatgcattacagagtattcgttaagcatcccagtattaccttcattagcgatgttgcgtggttgctacatgtataatgttcgtaattttgactaatgatccagttactgggtccgatttctcacaaatgggaccttagataacgctgtgaaacttgagataatgattcgtaaacctatttagtcgttaacaattcgatccatacggcgtgcagtagcagtctggcttcgctttagcttaatatacttcaagcaacaactcactactaagtagtaaatagtgaatcccagattttccatattttgctcttcgaaaaaagatcatatttgctgataaagagggaaagatgatttttcccgcataagtggaggtctgctcatgcgaacaagtttcagtaaaaagcttaggatgggttttcactagtgctgcatatgagactttcgtacaaatacatagtttttagtattagggaaactaatgagcaccttcgtaagctggttgtctacagagctggcaatttgggtttaaccattaggtttttccctggtttaaactcaaaaacctaccagtcgaattttgctgggttttaggttcaacttcatcatagttactacttactgcgactttcctcgttgcttctgcacaggatgctgatatgacatagatatattgcggcggggcgtgttttagctgacgatcgacgtggggttgtaaccattcccacacagggccagtatgccctgtgtgggagaacgccagaggcccctgacttatgattgaatgacgctgctactctgttatcagtcaaatgaagctttaaccagcaacgaagaacggggctaaagagatgcatccgcatctgtgtctcaatctggatgaagaggaatatggggggaaattggtgattttcaattgaaatctgtcagccatgaacacaatcagcaataattgcattctgtgcgtgcatccatcgcatttggcaaaggcatccgtgagttgtgcgtgcgcctcaatgcttcaacgagcacctttaccgaggcttacaaagtcgacgctagtgcattagcagcgatgcatacgggttcgtcgtacataatagaagtgccgatgacgactagccaaggcgaacccgtgcatgcgtatcggacctaaagaaacggatgctgcatcagtgatgcacatcggaacgaacaacaacatattaagtagtaaggtaaacaccttatatatgcgttggggtgaagagggtgatacatcagagtgagtatgacagtggacgatgtccggtttaaacccagtgaaatcagtttaaacctatccaaaaacccagaacctaattcattttttgaaaatcaacaggtttttccagctctggttgtctactgatatgtccttcttagtttagcagtccagtacggatgtacggccacgcagactgtaggtatttcaataagtaggacagcatgaagacacttatttgtcactgtgcttttattttgcagcgtgcagaatgctctgtgatagattgcagcaacactttttgtttcccttgcttcggatggattctaggacgattaaatcatttcggtcgcatgatacatttatttagggcggggtatgcacattcatgtgtcctcgacggtaattctagaaacatggactacaccaccttaatattatcagtagcgacatatcgttcccactataatagcgcgtgcttaaatcttcgggacgtatttttattctctctctcccaagcctcccaagatacttctcgattgtaaaatattgtttacagcatacgctaacggcaagtatgcccgtgttggggctcacatagctaagacttacagatctatactgtgcagacatcaatactttttgcatacgagtacatgtttttagaacaccacgtagcccagttggcagatccacaggtagagctcaatcgagtcgatcagctttagcatcggtcggcgcggatacgattccgcacaacatcgtcaacaaaacgaagaaacccaaaacaagagttggtcactgaatttacgaaattatttagcaatagcacaataccgtgttgtgcttacacaacagtcgtattgacaatacgattgttgtgtagcattaattatttagcaatgcattttacgcccaaccacaatacaatacgtatgcctaccgctggtacttgcatcgacactccaagactgaggagtagtacgattttctttgtgggtcaatggcgaggtacgatccgtagcgtagcaaggcaagtggacacgccgaggacaacggaagcctaatcacgccgagtacaacgggatgttctcacgctcaccgttgctgtcattctttatcgtgttcaggaacagcagtccctaggacgagcacaagatgtccatgacgatcggcagcactgcgtcccagtatatggggtctgtgagcacgaagacggtggcgaacggctgcgtgtcgaagcgtctgttgcgcttcagcctattgggcactgaagtccaggtatataatacgtggggaagtgcttgtgcgggtggtctaccgtggtgacccgtgaccggcgtagtccttgtccatgccatcacgaggtcgtcatcatgcttgccagccagcgcgcatgggtcatgcagtgcatgtgcatgacatgcacatgctcgtagcgcgcgcacgccgccgcttgagctctgctcagcttccttgctaccgccgtgggtaatggtggcgaacggattggcgcctgcaactcctgcagcacgtcacgtgcccgcgttttgctacaacagcacggcgtctgagccgaaggtggagccgcggtagccagaggcgctgcggctgccgcgcatggctgggagggaggggggtctacgcagagcgttcgtgagcgcgctcgtcctaagcgtgtgtcaggcgcccgcccaaatccacgccgtcgccggtgcctcttactctgtgctcgtgtgtcctgctcccagtgcaccaaccgacctggccgcatccaagggcggtcctggaagaggcgtgtcgaatgcgtgaggtgacggcaagcaacctgcggcatgcaatagcaatagctaagcagcagagctattctaaatagaccttcaacaagcgcacttaccccgatatccgtgcaatacggcgctaaagcagggtgaatagttcagcaaagcagagtacccatttagctaaaataatgcggttttaagccaaatccactttagaaggctcacaacccatagataccgtatttggaagaggcctcctaaaagacgggcctcagtttaatggttttcgcaccctttgctggaggctaagtccctgaactgctttgaatagtcactcggaaccgttggacattgagcctgaaaggatcttatacagaggtaaattgctgcatttttgcccccgggagaggcaacaattaaacctttccctagccctatctataaattcatcgaaagaaagcaaatcagagcgataaaacagagcgatttcattatagggggggcttcgccccgcatgtgatgacaaagggatgccggtaccacggcagcgcgagcatcgacagtgcttttcaccatccagtgatgaaatggcccagcgaaatgtcgagcggcaattgttccagcagcggtgcttcggggtccggaggtcttggaggcatttccttactccctttgctttcatcagagactcctatcacctggttagcgtacagccatgcgatgcaccgttgcatgggccgtcgccgcactcctggcgcaggccgacgtttcctcggcgacaccagcatctctactaactacaaccgacatccaacgtttagtgcattcgaccgtcgttagccagcgaaatctccccacaacgaggctgctgagggttcataagctctcaagcctggatgacgaagaaagaggcctccccgtgtccggtctcgaagcagtcgccaactcggtcaagtccacagtctccgtggagaagctccgggagtggctcaagagaggcgagagcacggacgacgtcttcaagctcctgacgctcgacaaggccgccgacgacctcctggccaacctcaacttgaacgcctggatcaactacatcaagctcttcaacgaagaaaacccgacccagaaggtcagtctgatcgccaccctcacggccaaatacggcgacgacggcctggccaagctcatcgaggcggccaagaaggtcccgagtaccgaggacatcgccaaacgggtgcaggccgagcagctccagagctggctggcggacatgaagaccaccaaggaggtattcgctctgttggcactcgacaaggcagcggacgatctcctggccagcccgctgctcaacacgtggctcagctacatgaagctcgtcaacgaggacagcaccaagaagacgagtttgctcgccacgctcacggcccactacggagcggacggcgtgtccaagatgatcgagtcggccaagcgcgtgccaagtactgcgacgatggccaagcgactggagaacgagcagatccggcggtggatcgccgacgaaatgtacccgatcgacgtcttcaccttgctgaaactcgacaagtccggagctcaactcttcacgcagcctcaggtaaacacttggctcaagttcgtggacgacttcgggaaggccaaccccaacacggagaagacgttgttcgcggtcttgcagaagcgctacgacgagccgacgctggtgcagatgctcatcaaggcaaagaacatcccgagcatggagagtgtcgcggttcgaatccaagccgagcagaccaagttctggttgggtgtcgacgttgaaactgcaaaggagcctgctagagttttcgagttactccgactgaactttatgtatgatggaccaacgctgtttagcagcccgcaattcaacgcgtggatcaagtacacggaggagtaccgcaagatttactttggatccgaacataccatcatctcatcgatggaggcgttctttgataccaagattgtagcgacaatgattgctactgcgagcaagaaaacaagtacagccagtatcgcgaaacgactggagaccgagttgttgcgggattggtccaaggctttacaaactccaggacaagtgtttaccaagttagagcttaccgtggattacaagctgtttgagcggacacttttcccgctttggtcgaaatacgtggcgtacttcagcgaagtggaaccgagcttcaaggtgactttgctcaaccagctgacgaagatctacggtgagagagacctgtgtaaggttctcgttagagcggagaaggtgcccaaaacgcatgacatcgcgacggacctgctgaatgcacagctgagtttgtggctcaagcaggaaacggacccaatgaaggtctaccagttgttgcgcgtgggaagagcagcggagaacgatgccaacaggctgctgtacatcaaatacgttaaggactatgcacttgacactaaaatttactagctttaatgcggatccaacggttgcgaattttgactctgatcacgacgggaggcattctctggttggccaattcaaaggctgcatggttctagctgctatacgttcgaggtatatcatacacagctattggtaaaaacagcatgtaatactacgtaagtggtacgtaagtactactaagtactttgaagtactttagatacagtagtacacatgtagtaagcgccggatcggtcaattttcaacgtgttttcgcgcgaaagtatggtgctcgtcgccacagtaacctgctgtcgaccaacaaggtgaaaactacagttgttaagttttaccaacacggaagaagtaatgccgtggctgctagtttgtccgtgcaagactactttatccaaaatcaaatgaaatacttcgaatacaacgatttgacgcagcggagcaggaaagtatggttgtgaaacttacttttacggtaagcagtgccaccacggagagcacaagtttcattctgaagtagcatttattcatctgcgcattgaagggtgtcagtgaagagtgcatttacttgcaactcgctcgttcctttgtttcctgctaccacattttctcgtgcatgaccagcacgagctacagtacttcctagaggtggagttgacgttagctggtcgactcaattgttaatcttggcgactagcgaattgagtcgcgcgtctgggttggctgcgactgctgcacgttgcaaccatctcgcctgactcgttgaagcgacggttcagtttgcgacctacacttgtgatgatgcctagccaccacacacttgccgggcaccctctagcgagtgcatcctatagttggcatggctacatctgcatttcagtctaaactgaagctttcgtgtagttgaggacttttaatcgacgccgaccagcctgtttgcaacctttaagtcgtaggagagtgtgccttgcgcaatgttcaccagtgagtgcactgtactgtagctcaaaccccgaagttacaagcaaagcttacaagcagaaaaacaagcttctgcttggtggtaaaaccttcgttctctgataaccctgtgtaattgctgtacgatgcgacgacaggccatctggttccgattgaaatcgcctgttgctgttaccacctcgtcgctctcagaacacatgcacctgtaacaaccattacgtcaccactccaatctcccgcgaacgaaatcgcccatacaaaccgccatgtctcgagtcgcagaaccgcattggcccacaactgcaacacacgccttggatcaagtgtccggctccttcctttctttccccacaataccgaaatccctctcagtcacaccgcacagaaaagctgccgacccagcacaccagagcagcatttcgccacaggacgagaagaagcgctagccccaaggcaaggcgagtcaaggcaaaggccgcccccggcaggacgactccgccaaagaaaactgcagccaagaacagcaaaagtgtagccatcttgctctgcgcgtagcgtccgtcgagcagattacgcgccacttgtcttgactggctactagaccccgcagccatgatgtactcgcccgagctgtccatggcgctggcccaccgccagcgtcgccgggccagcaccagcgcgtgcaagcgctctctgaccgagggcgccgtccacggggccacgagcgggccgagcggcagcggccgcagtctcctggcctccacctcgtctcgactgagcttctccggccgcaagagcggcggcttcgacgccagcggcaacgacctgctggaggacgcgcaggtgcccacggccgtcaagtgcctggagctcgtgacgctcgagctgtccgtgaccaagaagcacgcggacgtgcggtacgtcatgacggtgcggcactgcgagctcaacgcggcgtggcgccacgcgcggtcgtttgacgagtaccgcaagctgcagcagcgactgctcaagaagctgcagcacggccacttctgcgacgccgactgcccgtggctctatgggtttctcaagagctacttccccaagaagttcatcttcaccttctccaacgaccgcgtcgtggagcagcgcaagcagacgctcgagcgcttcttcgcggcgctctacggctttttatcggaccgcaagaacttctgctgctcggtggtcatgaccacgttcgcggacgagctggtcgagttcatctacggcgacgcgctgcagcagtacggactcgagaaccccgtcaagtcgtcggtgctggagcccgaggacaggatgttgctgctcagggggagcgccgactacagcgccaagtgggaagagccggccacgccccagaagctgccgctgatggagagagagtcgttcaagcagcaacaacagcagcagatcagcagacagtcgtcgctcaccaactcgctccgaggatccctcacggacgacgatgtcgtgaacgacctcaacgccggcaactgcgggatttgcggctccccactgtgtggcgtcgcgttcggcagctcctcgtcgtcatcggctctgaccgtgtccagtctggaagacagcagcagatctatcggctcgaacgctgtacccccgctatctcgaagcagcagcaatagcacgggtagcaacagcggcgtgttcaatcctccgtggctgggcacgctcaagcctcccggtaataacggaggcagcgccaacagcttcggcggctcgcgacgcagcagcagcagtgcaagccgacgacgagcggccacgtactacctgacgacgctcagctgtggccatcaattccacgacgagtgcatcgtgccgaaactcaacgagtcgctcaagtgtccgacgtgtggacgcatccagaccaacgattaaaaagctgcagacgacgccattcaactatcactactgcagcacagtatgaaccacgtaacttcggggacaaacggaagtcaaagaggcgatgaacatatccataggccgctgtattagaggaagactccgttatgcaacgcgtacactccgagagagagagcccttttgcccatttcccagtgttcacttcatttcctgcggtgcagataccacgtcgcgtcgccccaagcttcctgcgtgaccgtgagttgacgcagttcgacgaagttctgggcgtccggaagcttgtgcgtggccgtgatgacgatagctcccgacttgcagcagagcgcgagcttgcgggccaacgcgtgcatcagtcgctcgccaaagcacgtcgagttgaggaacacgagatccacgttggccggccagtccacgaccagcgcgtctccttgagtaaaagtgatgcgcgtccgcttcttctgcatcgagagcgcgaagtttggcttgatgagcttctcccagcgttgcagaacctcttgggagatgccgtgcagtccctcgagcacttcaatgccgtaacaagcgtcgaagtcgtgcaacaaggcggcagcgaagacggctttgccgctgcccgagccaatgtcgagaaacgtcccgccgggcttcttgagcacatggtgccaccgcttcagcacgtccagcaccactttgaacggcacgaaggcgatctccccgtacacgaggctcatggagatgtactcgcgttcgcgacgttcctctctcgaggccttcttggccacttgaagcgggtgttcctggtacagcgtcttgaagatctgcgtcatggcagccatggtctcttcagacagggccgacaccacgacggactggttcgtggggcttgaattgacagaagaatcgtcctcttcttcatagtcgctgctgtcctgttcgtccactcgatcttctggagctaagtggtgcttggtggagatatcctgcaggtcatcagagtcgtcgtcgactgcgtacgaagccatgggcgagagagatctaggcgaagctgcgacgcttgacaaggatccgagtggttgatgaatgaacggacgctgcaatgcgtgacgagatcttggggaagctgtttaagtggacctaacgagctctggggtagttctccatcgtgtcttgctggttcatccagcttacgcttgtgccatgggcgggggagggctgaagttggtccgtttcgccagccaggcatgagcaggggctttatttttgcgtggtgtctactagaaggtgggtttcaccgctgcgatttcactttatcgacggaggtttaactcggggaatgcgcacagaggccagcgttcaaggtctcactgcaccatggacagtcggagctcgctgcgtcaactgcaccagcagcttggggatttcagcttggcggggcacacgatggctacatcggttagaacgagcagcagtggcgggggcagtagaagtcacgggttaagctggcacttacccgacaagcgagctgctccaccattgccatcacttccaccgtgggctggaaactcaaaccaacatcggcgcgacagtcgggaggagagtgtggaccaagactacggaccgctgcctagtgtgccccctcctggaggatggaggaagcctcgaccttatttcatgaccacgaagcaaccccaactcccctccaagatccctgacgccgacgtacaccagcaataccaggagaatgacgagcccaagcttgaaccacagaatctgaccgaaaaccaacaagcagagcacgaaccagcgccatctttcgaccctaatccgagtcaaattgagtctgctccaccaccaagcaatcctagcaagataccagccttgcaaaacgatgaagacgaccccaccagtagcggaagcggcagtgacacgaaccagcaagaagacaaagaagcgagacctcctcaaactcagcgacgctctccacttcgtggtcagttctttcgtccttggaagaaaagctcaagtgatgacagcgttagcagtggagggtggtcgcctcctgcgtcgaacaagtggaaggatcgagcgatcatggacccgtttgccaagcgccgagctagagccaagaatcccccggcagcgccaccaagagcccagtcggatgaggctccagcagctcaaactcctccaaattatcctagagatcagccaaaagttcatcattcccctccaaaatccgccagcaagtcctcttctcctagaatgtcaacttctccaaggctgaagactccagaacgaaccccgctgaatccgttgcgtctgtcatcagctgataaacgtcgcgctgttgcattgactcgccctgtgacacctctacctccgccaaagtctcctccacctcttccggttcgaatgtctcgggagaggctcagactttcgcgagatctgtcacgtgacagtttagctggcactgaagagcaccttcctgatccgtttagcaaccaggaacctgttaaactcgctgcgattcgccgccctcgacaggccaaggagcctcggagctcaaagcctcacaccaagaagtcgaccatggatgcgttaaacgaaatcaagcgcaagcgcgaagctcgtcgagcgctgcaggctgaggagaagcgtcgggtggagaaagaactacgagaacatggcgacgacgcaggctacaagttccgaaggctcattcagcagtaccgagatgcgcttcctccttgtcagcaacagcagcaacagcttcagcaactgcctctactgtctctgagctcgtccgtacgaccgccaccaaccccaacaaccctcgtggacgctgcagacgctccgagactgtcagtcttcatccgcaagcgtccactggccaagaaagagctcaaggccaagggatacgacatcatctcttgcttattcacattagaagaccaaaacgccagcaactcggcgcatttacgccgagaactcgtgtgccacgagcccaaactccgcgtggattgctccgagacgctggagaaccaccagttccgcttcgatgcagttttcgacgagctacaggagaacagcaaagtctacgatgcgactgtggggccgatggtaccctacctcgtctcggaagctacaacgtcgagtgatacaacgagcttgacggtgttcgcgtatggacagacgggatccggcaaaacgtacaccatgaagtccatttatcgccaagctgcggtcgatttattccaacaactggaggaactgaaagagtcaagctcaaatcgccgcaattctcgcgttagtgttggcgtgagcttttacgagatttacatgaacagcgtgaacgatttactcaacggacgatcgcgcgtacagctcatggaagacggtgatggtgcggtacaattacccggacttaaagagctgccagctaccagtgcggacgaactgctggagctcgttcagctcggagagcaagctcgagccacaagtgccaacgcagtgcacgacgattcctcgcgttcacacgcgttgctgcgtgtgacgttgtatgcggcagataacaacaacggccccgctttggcgagactctccatggtcgatctggccggtagcgaacgcgcgagtgatactcaaagcgacaagaagagcacgcggatggaaggcgcggagatcaacaagagcctcttggctctgaaggagtgcatccgtgcgttagatcgaggcgccacgcacattccgttccgacagagcaagctcacgcaactgcttcgagacagcttcctctcgcagaactcgaaaaccatcatgatcgccaccgtctcgccttgctcggagagctgcaaccacactctcaatacgttgaggtacgccgacagactcaaggagattggtgcggctagttgaatcgtaacaattgtcatcaaaagagcttttccatggtactcggatggtttagtttagttttaggttgtgctgaacaatggattcttcgcaaaaatagctgctatgggggcattccacctcaagcacgttcatgaacttttgacatgttttaatgtctccgccacaggagaaagctgtagctggtggagctacaagtgacggcaccaagacaacagctcgaggaggtgctcggctacacccgctcccatccatcttgttgcaatgcttgactcctatcgaaggcaaactatcaacggtaagctcataacgctgtatgtgaaacaaatagaaagctctgtgtctaacatttgtggctggatcatgcaggacgcggacttgtctgctcggaacgtgacccaccgctcgcctgaagtgttcgaggacatcgtcgccaggtctacgcagatcctaaagaagaaagtctcagcccaagctggctatggcgtgagcttattgaactcgccggtggcaacaggagctggagggtcaatctccaatgctcaacactccgtgtcaacgcagtacaaccgaggctacgcgttgtatcgactgcagctgtacgctcaagcagctgaagacttcttggcgtgctcgcgcagcgacccggaccgtgcagctcctgcgctgtacaaccgaggttgcgccttgtacaaactggggcgacacgctgaagctgtgcgtgacttgacgaaggcgctgaagctcgactcaaagaaccctctcttcgtcgaaagccgagcgcgtgtactcaaggaaatggggcgattcgaggaagccatccacgactacacctggttagacactcttcggcaccacccgaccgcttcgctctcgagagatccaagtcaagacgttctcctcgaggccgtgtgcagccccacgccacaaccaacgcagcaagaaaccacaactctatccgcggcgtctttagcgtacgaagctcaagaaagcaagacgaaaatctggctggagcatttcttgaaacaggatccaggcagaacacgcagccttagcgacgtcactgaagctgcgcggttggtgcgttgctggagcttcttccgtgggatgagagcgaccatgatcgagcgctgtatgcgtgacgccacgtactaccgcttcgagagcgaccaactcgtggtggagcaaggcaaagcttcgtcgagtttccacgtcgtgctggatgcagtggcgtcgctcgtgaaaaccgtgacgttccaggagtccagctcccgcgagctcagcatgctgtaccaaggcgacaccatcgggttggagccgtctagcgccacgaatactgatggaaggttgatcatgctgcgccaccgagctcaacgccagctcatgctgcgctcaaggatcgggtccagctccccactgctcgcgtcccatcgatctctgaacacggggttctactccagcagcttccgagcgctggggtctgcagcgcgaacattgccggctctgcatccgaaagaaacagcaactttctcgtgcctggacgaggtgaactgcatgttgctggacgtggacgtgtacctgaacatcttgagagagcacgaggagcggctgctggaagaaagactgcagtttttgcatcgctgccacgcgtttgagacgtgctcggacgaaatgttggcggctttggctgccgtctccgggtcaaagttggtggatccgggcaaagacgctctgaaagcgggcgaggtggtgaagcagctctacgtcatcaagaaaggggtctgccacgtgctcaagaccatcaccgtgccgcattcctcaactgcacatcggtcttcgacccttgcgtccagcagagttgcaggcggcagcaggtcggaggactcgctcacgtcgcggtcgagcgatggctcctgggtgctggacaacggctggatgctcacgaacccgcggctcgtgagcagcgcgcaggctctggccgctgccaagctgcagcactcggaggaagtcacggtagcagtactagccagcggccagctctttggcgaactaagtgtcctccaacccggtcaacactcccccgtcaccgttcggacccaaactttggtcgagttgctggtgttcgaggaggacgacctgagccagctacgcgtgcagtacatgagcggcaccatgaacgcgttacaggagtctttgctcttccacaaccctccacagcagaaactcgcccaactacgctgcgatctgtcacaatggacccgagagaagcgcagtgtgctggaagagctgttcccaccagggtcgccagtgaccaagtctccagccaagaagagccctacaaggacgcagtcacccgtgaaaagggccaagaaaccggccaaggctgcaacacctgagccaacagaagctcaagcgcagacagcgttgcatgctcgccctttgacgtcaccgaccagcaagaggtcaaagaccgctgcggcgaacactcgaaggagcatgttctattgagcattgggtgtggctttctctcagtaacgcatgttgacaacatgggtattcaggtctcaaagattaaatatcagttgatcattgagaaagctttttgtgaaaaagtgtactacagtagtaggataaatggattgcggttcccgtcaacaagaaaatcgtccacagtatgggcctgagcaccgcgcctcgaagagcacgatgaccccccaggcctcattgacggatctcaaactttaattaatcattgggaatcgcgagtttaataaaaacgacacaaggctcagaggagcacttgctcgctgctggatcaaagatgcaatgagctccgcatcgtcgcggcggttgaatttggctggagcagcgctgtcgacccttcttacggctttttacggtgtctttttacggtaataagtgtggttcgcaacgaactctattttggcatatgtgcttacagaacgctaaaatataggtattttatgtggtaaacaaaagtggatggaccatcgggataatctctaaatatagagatttatatacaaacaccaagtgaacacaatctctagatctagtggaaccagcgccgcacaagaacggcaaggccccagtttcacacagcgcccagcactcgtcgccgcagcaccatgatctccaccatcgccaagggcctcaccgcgcagggcacgcgctccatgagcacgatccgctacgcggagttcggccatccgctcaatgtcctcaagtgcgtttttgttgccgtttaagccagtgctaaacaagtttaagtggtgctaacctttaacaccacctaaacttttttttatcaggacggaggcggatgacaaggaggctgctccggccaagggccaggtggcgcttaagttcctggccgcgccgatcaacgtggcggacctgtcgcagatccagggcgcctacgccatcaagcccaccttcccggccgtggctggcaacgagggcgtggccgtcgtcacggccgtgggcgccggcgtcaccaacgtgaaggtgaacgaccgcgtcatccccaccagcgcgggcttcggtgagtgtttttctatctttttattttagcactatcctaaaggtgttaaaattttaagctagtgttaaaggttgctaacggttgttgcaatgatttcctgcaggcacctggcgcagcaaggctgtggctgacagcgccgatgtgatgaagatctcggagaagattaagatcgaggacgccgctacgctggccgtgaacccggccaccgcctaccgcatgctggccgacttcacgacgctcaacaagggcgacgtggtgatccagaacggcgccaacagcgctgtgggccaggctgtgatccagctggctgctctgcgtggcatcaagaccatcaacatcattcgcgacgacggcgactacgacgtgacggtgcagcacctcaagagcctgggcgccgacatcgtgtgcacggccgactaccccggctcggccaagttcaaggagctcatctcggacctgcccgcccccaagctcgcgcttaactgcgtgggcggcaagaccagcctggacatggccaaggtgctggccaagaagggcgtgcacgtcacgtacggcggcatgggcaaggaggccgtggccgtgggcacgggctcgctcatcttccacgacatcacgctcaagggcttctggctcagccagtgggtcaaggactcgacggtcgaggagcgtgccgccatgctctcggagctcgcgggcctcgtggaggccggcaagctgcgcacgtggattcagacatataagttcgaggacttcgacgacgccctgcacgccgctgtgaaccgcacaacgaagcgcaaggtcgtgctgctcatggagtagattgagcaccactacagttgtcgcttgtttggtgtcgtgcgtcgagcacaggaaagctagctggcagcgactgcggacatacagagaaaagctggaggcgcgagcgcgcgtgaacaacagaggcgagcccacaatcaaaagcaatgaatggcagacctgaatacgagaaaaaacaacgcgggaaatggataaaatgtgcagttccgttgatacatctcgtcggtcatcaggcgttgacacagcatcactttccatttaatctctagggatatcgtagcatatctccgcgtcgggtctaatggtagagcagcgtgaggtgatcgtcccccgcagtcgaggcaaccttctccttggccaacaaccgaggaagctcacgctgcacctcctgcgagtcaaccgtaacctgttccttggtgaagatctgcagggccttggcgagcgcgtccacggcttcataggtgccagccaggtcgcgtccaggcttgtatcccttggccagcagcaggtgcgtgtgcggccactgctccaccttgacaaagtgcagcagcgcggccagccacggatccttgacctcccaggccggatctgcctgggccagcgtggccacgtccaccttctcatcagcagcggcttcagcgttgaggccactgtagaacacgttgaggtcgccgtccttggcgtacggtaagtgcagggccgccaagatcgtgagactctgggcgttggcccgactcagagcggagaccagcgcgtcggccagctcccaccgctggctggccggcagcgctgcagtattcactgcgatgatggcgtccttggtggcaggccactcgtagatctgcgcgaagggggctagttcagcaggcagcagggtctccactgtggcccgggccacggggacagcttgggctccgttggatttggccaagtgcaggacatctgcaaggggcaataagggcatcggtgagaagagcggtgagaggagaacaagctgcatttgaattgacagaagggcgtacgcttgccggcccgggagaagtcgtcgaaggccaggtacacgccgcccgagagcagcgactcggccatgttgattcgattgaaatggctactcaacccacttgaagagcatctgtgagatgctctttaagtgtaagtcagagatagagcctttttgttttcaacttgccttcaaatacactacgtcaagcgtaacttcatatactttgggactgtagaatagggcatacagcgtgtcgtcatcgcttttcagcttgaaagtacaattggatctccactttctctaaccaagttgagtaacaagttccagcttagtccgggcaaatagcttgggctgccttgtgacacaaggtcgggtcgatagcaatagctgcaggtagcttggtaaacgtgaacgggttctcgcccacagtgctcgagattttaagtcggtaggagccgtacgagctgcgcgatcgacacgagtaaagttccggtggatactcggccttagttttcccagtaagtgcatcatacgcgctcgaccccatcgatgcaacagccaagacgtacgaccctttcttgaggaaagtttgcatatacggatcgttgtagctgatcgagtcgccctcaacatttgcagtcactccgccgtcatcaacgaagaagacgggggtcgtgccgtctttggggaacaggtagacgatcgagtccaagtaggtagcgcgacagtcgccgttcaggtcgatgaacgagccgttgtctgcgatctcgacggaaactactgcgaacgatacgtccgtgtcacgagttagggtaaactccactttgtcgacgctaacgtagcccgaagcgagaataatcgctccatccagagtgaggcgagacgtcagaggtagcgcagcctccgcgactggtggagaatacgcaggaaagcgctccgaattggctgtgtggcttgatccgtcgtcaataccatcgaatacagcaacgtcgataccgttcgccatcaagtctgcaacaattctcttggctggaataccagtattgccacacatttcaccgcagtggtgaagtgccacaacgccgtggtccgaaaaggataacactggggatccggaagacccagtctttgtgtcgccgctgtaagagtacccaattgtgccgcatgtgctggcactcaaactcagcaacgccaccttgctggcatagtcatcctcgagagaaatgcgcttgttcttgcccattaggtgctgggggatgtacagttgttcgcctacaaccccatcgcgggtctttagccgcagatacccgtacgtttgggcagtttgggcgccgttagttggtaacttgagcaacgcatagtcaagctcctcactggaatggacgaggtctgtcgtgaaggacaccatttcacctctacactcgttcaacttgcacgaaataccgtcactgcacgcactatcttccgccatgaactccaccgtcgtaccagtcgcctctgcatctgtagatacgcagtggtgattggtgaggatatgcccttggttgcctagcaaccagcctgtgcacatcgcggactctccgaaaccttttggggtagttaaccgggccacagctcgagacgccaggtacgctgtctgcgtggtgttctcggcgtagtagcaaatggctctcttggtattatccgcaacgcacagagtctcgtcggtggccacgatgggattggcgtcgtccatgagcacgtagtagtaggaatctaccgcgaagccgtagcactttgcattgctatcggtcacgctgaaagtctccaagatgagatcgtcgtcggtagagtcgaagacaccatcactgcggtagaactcgagccggaattctttcgctaggactggagaggcgaggacatcgtagtagattctaccactcgggtacttttccgagagattaaggtatcgatcgggtgtgtcgaagccttctactgcacgaagcaccacggacgccccacgcggcagccagagcttactgaagtgcagcgccacatgggcgtacccgacgccctttgtcaaggtgaaagaccggaatggactggaactcccaggtgtttcaccgtcgaatgcgacctggaactccggacagcccatgccaatgttcacggtgcgtagtcgggattcacttgtcgagttcgtactggagccgtctgtgtctgttgtccacccccctgcagtatcgtcagtctgcattggggtgaagacagcactgcggagattgctactgcgatccatcggacttgtagcataggcggccaccaacaacagcgtgacaaagcctgtaagccccaacgttcgatagcggcgttgagtgtctccactggaaggctctccatcaagttgatcgttgatcggtgcagccatgtcgctcatttttcagctgatatgatagcttggccagggcacgagcgtatggctaaatgaattcatggtgaaaaaggggatggcacaccggtctcgttgacgctgagcttccatccgagttggcgttggaagatagacagctgagttttgggataaaattgagcttgcctatgaatagggtgggtgacaagggtagcacgacaggcaacaaaagtattgagcggccgatgaacttcaaaaatatggtggggacgtctggcaaagcgtttttgttggattccacaccgcagccctagtgtccactgtcgtacactttcttgaatgcgacgataatatcatcgctctccggctttgctatcgctaggcgtggtatggaaaacactgctttgatatgatctgggacttctcctagtttgatccattgcttgaactgatacatctgcagcgactccgcggggttcttcaagtcagggattcgtttgagcgactcgaaggtgatcgccaacgcatttgcatccactttggtcttcagcaatttgtaaatctcttcgtcagagaaactttcacctcccttcttgtccctaaacgccttcgtgaaccggaaccaaatgagggtcctcttgctatcgttgattttcgaccaagcgttagcgtagaatatgttcctgaacaggtacgccgggccccaacccaagccgatcaaaacttattcgagattttcacgtcgaacttccgtagcttcgacatctctttgtccaattgcacaagtctggacaccaccgagctcctctcatcctcgcccgtagtgttggtgttggtgttgcctaccgccgcggactcgtgcaatcttaacagcctatttggagtgggagtgatcttgaagcctggggccttttcatcgtgcgatcgggcctcgacagagtttgctcccgcatagtagaggacgaggaatagcagcgtgatgcaaacgcatctgtggagcgctgctggacttgcttggcttctggggaatgggaaatgacagaaggggatttaattaatgcaggcatatttggtggccaaattcaaggataaacgttttggaaatacgtggcgtgtacaagaaactaaataataccagtagattggggctatttgtccaaacgtaagtagatcacggggactatttataagtacactgggaagcgttgattacacggattttaactatcacccagctacgcgctacgcgcggtctttcagaccctaaaggctcgattggatagaaccctaaaagtccgctgcggcctgcacgcgtccccccctgctagaagggcaatcctggatcctgggtttgcatccgcgtgcttcgcacacgggctgacaaaccgcgggtgttcgctcgcttcgcttgctgagtgcagatgatctgatctacttacgtttggacaaacagcccaatctacttgtgttgcttaagaattcccctggcgaatactgctttccgagtcttttgggacttctcgccaacaggttcacagtcaagtagactattggagagtggggtttttgtcttcacgagcaagtttgatttcttcctcgatttttatcgttcagtgtgagtgctacagcacaaggcgaagagagtcatagcacacgctagcgtcgacctgaagtgaagtgcgtgccagaacgctctggcccccgaaggctatggtgtttccaatgcatttgtgcttgacgacgcgtactgtgaactttttcaattacgttcgagttgcgctttacagctgtggtacgttggtactgctgtaagggcttacggaaagttgctttggtacgagagccgtgaaagcgaacgcttactgcttcaagacgtgctagcgcaattacttatgcaacagtttaatgcaattcttacccagaacaagaatttctgaagagcgggtacgatcgcccaagcaaactgctatctatatgtacactacagcagtccgtcttaaggattagcttccgccactatagatcttggtaaatgcatcgatgatgtcgtcccttgggccacgctctgctgtcatgatcgaactgtgcggcacgccgagcagtgttctgatgctggatgggtcttctcggctactgacccacagccggatctgatagttctgcattgtttccgcgagactcttcaagtcggggatttgcttgagcgactcgaagacgagcgccagcttttcctccggcactttggtgctcagcagcctgtaaatctggtaatcggtgaagctgccagttcccttcttgtctctgaacgccttggtaaacctgaaccactggattgtcctcttgctgttgtcgatattcacccacgtcttgtaatgtttaggtacttgaacacgtacgctggatccttcgtgactgatccagagcgcctggggcatttttactcaaacttccgcagctttgatgtctttttctccagttctgagccttgacacccatgtcgagaagatgggcgtggaatcccattttgtaaagaggtagagcattgaatccagatacgtagctccgcagtcgccgttcaggtcgacaaacgtgtcactgtccgccaactcgactacagaaacaccgaagaagatatcgatgtttcagctcaaagtgaactccaccttgtcaatacgtggactgtgctaaccgacttctttgtgtggcgaagacggcgattaaataccaacttctccaataaaattcctgtttagtaaaaaaaaagaattctacgtgtcgagccttgatatatccacaagttcccctattctgacgtagtaagtcgcctctttcgatggggcagtattctccgcaagtttcggcattctaataaaaagaacacacaatgcaacttctcgaacgtattgctacaccaaccgtaaacatgaatttccgtcggggcggagttcactgggaccaattacttgaggagtgtctgctggcggtggtgcatatcaaattcgacgccttgcgcatactttttttaaataacggatattttaatatagttgtttttttattaaacaagaaattcgttgaaatctttggaaataaatgacgttgcgattcgatacgtcttggtaagctgaagaaccgttggacttcaggtacaaaaacaaataaattcgtcttgcaaaggaaagtttgcactgccgactttggacgcgatattcaaatcaacatgcctgacgtagacccccggtgtccgatttttaggggtttattggcgatccgggcctacacgagagcgtttgcgattaattgtgtgactacgcatcgagctcattcgcagcattttctacgtcagtgctgttcagtattggataaagagaaaggcgatcctaactacttagcctattgaccgctagacgcctggtaaatcctaaactcataggctctcgggaccgtctagctagttttcttttgcattccacagtcaattgttatacagcttcgtaaacgcgtcgataatgtcgtcccttggaccgcgctcggacgtcacggccgaactgggtctcattccaagcagttttcggatactggctgggcttgctccatcgtcgatccacagcatgaactgatacttctgcatcgtctcgcctagactcttcaagtcgtcaatttgcttaagcgactcgaagacgagagccagcttttcgtccggaacttcacggctcagcagcttgtaaatctggtaatcggtgaagctatcagctccattcttggccctgaacgccttggtaaatctgaaccagatgagcgcccgcttgctgtagccgaccttttgccacgtgttgaatttgtgcatatagttgaacatgtacaccaggtccttaccaaaatgcagccagactttcaccccgccagccatgcccagcttctgcaacttccacaagctttggtccaactcagcaagtctcgacacccacagcccatgaccccctctctcttcgtcagctacaggctcatgcgatcggagatgcctgtttggcatagaagagatctcgaccttgtcagcgtgcggtagggcctcggcagtgttggtccccgcatagcaaagtatgaggaccagcagcacaatgcactgtgtacgcattggtgctgttgatcgactttcttggattcgatgcgcttggggacaacttgcgaaatggacgagaagagatcactgcggttatccattaggacggcacgagtagaaacttgtgtcgcgataaagcagcctgttcatgagcaaattcaattcttctgtcctcatgttgcggtcatccaggattgcacgactacagacaacgacttacaaagccggcatgcttaatgccatcctcctatataaaaacaacgataaattccctcccgtcaaatctgtaaaactgtcataaaacacacggtgtgttgcataaagtacacaagaaagcatataaagtacgaaacaacagatggtcttcaaagatgaagtcatttgattgaatctgattggctggtttgctcatgttaagctttgcttgacttcgtctgccggctttttgtgtctgccggctttgtaagtcgttgtctttgtgtactttatatgctttcttgtgtacgttatgcaacacaccgtgtgttttatgacagttttacagatttgacgggagggaatttatcgttgtttttatataggaggatggcattaagcatgccggctttgtaagtcgttgtctgtaggcctgtctagtcagcagtattaataataggcagcttagttttagttttagggggcggcgttcctcagctagcttgcgtgcaggccaactagctggccgactttaagacccaccacaccactcccggggctgcctcgcacggattcactgcgaacccgctgaggcgtcccttcggtgatctaagaacgttgccttttgccccaaacgtgttcacggagaaggttcgaaaaagacagtttctatgaggaaatatgttgcggtagatcattttaaacgcaataaaaaaactaactaaactatctatctatcttgcgggagttctgccgatggaactatttacacagcgccacgctcttctccttttaattagaatcagatgaagacgtgacggagaattcgctaccggagcggtagattccttgcttcttcgggaccaaagtctgatccctcgcgacttgcagcgcactgacgctgagtgcgtccttgatgcacacggggcagaacgtgaccttgcgcttctcgtacttgaggtcgggctccatgaaggtcagcagcttacgcacgcggcacgagcggcacaccgcctggaagcaaagtttgcacgagccccgcgtcgtgctgagcttgccgatccggctgtgactgaccgacgtggagcagctcacgcacttgtcgtcgttgcgcttggcgcccatctgcttcttctgggcgttgcggtgctccatgatccacgacagcttcttcatctcgccgcagtgcgcgtactccgtgcacgccagcagcatggacgcaatggggtgaagcagcagcgacttcaagacgggacctccgggctcgcacgctccggtcgcgtacatctcgaccgacaggtctcgctcttggcggaagaaggcgcagaggtggcagttgccacgcacgaggttcggcagctcgggggcctgagggaggccgatggagtgctggatgtggtacccgatctcctcgccgtcttccgtgcgcataataccggtcgcctccatgtagacgaagtcgcggttcttgaccatcttggtcgagcgcagcggcaggtccagctgcatccatttgagctccagagactgcagtgggtcctcgggcgtcggcttgacgatggtggacagcacggacgcgctgctgatatcgtcgatgtacgacgccttgagccgcatgctctccaacgtggggctgatgacgccgaacatgacgtcctcgagcttgcccgggatggagccctcgcagaggatcacgggcatgttggtcacctcctggtcctcgcccttggtcgagccccgctccgagtacagacgcgcgttgtccttggtcttgtagagcttccagcggttggtgtccaccttcttgtcatccgcccggaactccatgtagcgaggcagctgctcctcgatgaaggtggacacgagcgcctgcagctcggccttgtcggccaccgacagctcgagccccgggaagaggttgcgaacgaagcggtccttcgccatggtatccgtcaatctacagtatcagcctgttaaacaagcttttggttgctctgtgcgaatggagaagtgtgtggcagtcgcagcttgctttgcttggtcctggggtcctggctggacggcctcatgccaaatccagcgcacaccggtccgtgctcgatcgccggtgcaggctcaggctacagatcacttaccgacggatttgaggacgctcggacagagagagacacacaccgagcaagcatcgccggtaggatttcgtgaccacgaagcggtgactgatgagtccacacgggtggcatccaagcagcgcgatcactcgcgtttcaactcgaacacgaggaaaatttgcccgccacggttaacactactgtaactttggtgtggctatgagctgaggtccttgcgatcgttgagccggtttgcgccgagtctgcccgtgtcggtcggagcctccgactcggagccccagccaggccaggtggcattgagcacgtggcgtgcgagctcgagacggtgaaagacgctgcggtggctctctcggggattggaggcgccagctctctgtcggtcggtcatgcgagcgagcgaaccggacgctttggcaccgcgactttcccactcttgggaagcacagacggctggggcgttaataacgtgttacgttaacggaaatgtatctaccgcgcctggaaggtccgggctgagccctaagggagtggagtggtgggttcagaagcttggacgacttgggcgagcgctctgcctcggcccgtcgctccgccccttatcgcccaagttggaaacgactatttcagaaatctgaaactcccattgcttacatcttagtcgagcgtaagcgtgagtgctcttctgtgatcgtaagtctatctcggcgtcttgtggctcggaggtggccgccacgcaggacttcaacgacagcaaggttcgcttgacggtcgcagctagatttttaatcgactcaaccccatgacgagcgccgttcgtgtcgtgccctcgatcatggacaggttggccgtcaccacttgttgaagcttactgctaagctacatgttgcgccgccgattgccaactcagcaatgctgagggatctgggtgttaaatgcctgtgacgaccaagcaaatctgtttaacgcattgctgcctgcagtgctggagttgagcaacagcagttcaccaagatctgtgctggatgggatacgagtcactgtgctgtatccagctttgtctcctgggatagcgcggcgagttggtacccaccgggactctcgcgtcccagtttcgatacaaaaggctggactacatgtaccagtcggcagagtcgcatggttcgcgtcactcgcatgaaacgccaagtcgatagttgtgcgcacatgcaggtcatctagagagctagcaaggaccatatcgagcggcgaaaaacgaagccacgccacgaaagtgcgtgtccactcacatcgtctccatatgagcttgcgcagagtgggaagtggcgagtgtctgtcaaatcgagcaacatgacctaatagttcaatcgcctctgcactcaccacacagcagcaaacatctctcctagagacagacgccaagcatcatgccttcttgtagccatcatcgccagcatcttcacgctatgggtgtattcggatgcatcacgctattgctggtgctaacctgtgctgcaacgtccaccagctccgagactccagcgtgtaagactgtagcaacagcgatccctactgagcctgaagtggtaccagtgatcccgtcgaacgcgtccaacagcggatcaagcgactccaaccttcgcaccgtgaacattggtatgggctgcccggagttccagatcgccttcgacagcgcaacgcccggcaactcgttaccattcaagtcgttcaccctgacgaaggggaccggatacgcgtacgtggagctccacttcagcaagctctgggtcccgcgcgggacttccgtggtactgcgcgcagtggaaggcttcgacgtagcggataccaagctcaacctgtccacaacctacccgagcggccgagtctacagcgacgttgttgcgcctccggtgctctcgaaggagtttcgacttgaattctaccgcaacgaagcaagtcgcaacactacggacgtagacctgactaccgacgacttcaacgtgacggacagcaagtccaagtgcttcggcttcgtggtcgcctcgtactactacgttctagtagacgacagcaaccccctcgtcgctaccgtcgagtccgtttgtgctgcggacaacacgaacgaagccgtgtgctactacgatgacagcacgacccgtacggcctacttggctgctcgctcggtggctcggctgttcatcagaaaaggccgcaacatgttcgcgagctgcacgggctggctgctgggcaaccaggggcacctcatgaccaactaccactgcgttgctacacaggcagaggccagcacgaccacggtggagctcatgctggaagctggcaaatgcaacggcagcgcgtcgtgcacgtggaaggagtgcaaagggagcatggtcgcagttacgaccaagctcgtgcacgcaaatgaggcgctcgactacgcgttgctgaagctgccgtcgaacggagcgcaggtcgctcagacctatggatatttgaggttgaagactcgcgctggtgttgtgggcgaacaactctacatcccccaacatcctctgggcaataggaagcgcattgcgctcgtagacgactacaccagcaacgtggcgttgctgagtctgagcgcgacttcatgcgggacaaccgggtactcgtacagtggagatactcaaagcgggtcctccggttctcccgttctgtcctattcagaccacggcgtcgtggcacttcaccactgcggcgacatgtgtggcaacactggcatcccagccaagagcatcgtcgccgacttgaaggcgcacggcattgacgtagctgcattcgatggtgttgacgatggattgagtccctcgtcgaacttcgagcggttcccagcgtacactccacctgtgcccgcagtcgtgttgcctctgacgtcacgcctaaagctggacggagctatctccctcgccgctgggtttgtcagcattgaaaaggtggagttcactttgagcaaagataccgacatcatgtttgacgtgttttccgtcgagatggcggacaacgacacgttcgttgacctgaacggcgactgcagagctacgtacctggactcaatgatctatctcttcccagtgggggatcctactcccgtcttctctgctgacgacggctgtgtggatggcacgctcaaagacggctccgtcagcttccgtgatccgtccaagcgcacgttcctcaaaaaaggctcctacattctcgcaatagcccccacgggttcgagtgaagaagatgcactcgcaggcgagaccaaagcggactacgctccagagctctacacttgcagagcccgcggctcatacggctcctaccgactggagatctcaagcactgtcggcgacaaccccttcactttcacaaagctcccacgagccattgtgatcaaccccaagtcatgcaagaaacccacaggactcatttgctccatctagctccatttttttataaagcaagatttttcttttcctaccggagcttggagataacactactatctgtcctggtcggcgaggatgatggttcaagtactaccgtacgactacgatgtaagctcgactttcagcgcaaattgctggagcttccgcacattctggtacgacgagatcgcgattctcttgtcattcccgtcaatatatctctgataccggaaatcgtggaattggctcggtgggagcacgaagtaaagccgcggttggtcggggttgccgagaagctccagtagatcgtggaggtggctctgcttgagcggcgttttgtgtacgcccggcacgtagaatagcagccttggcttcactatcgcgtccgcaacgtatttcgttgctggccgcaagaacgtattggcctcagcagtggaaacttcctctctagtgctaaaagtgagttgattttgtatctcgagctgcaccgattcctcaacctcttgctcttccgcagtatgttcgcgcttgttgccttcatcatcccaatctgcctctgcaaaggtttcatcatcgtcgtattcctcgttatcgtccacaagacgtcgggctcggaagttcccaactcgcgctagcagcgtcagcagatgctcttcgagcaattgatcccagtggaccccaccccaaccaaaatgcgtgatcggtgaagcgaagcgttcgagaagtctcgccttgttctgcttgtacaattgcgcgtagatcttccgctgcacgtacaacgaagcgaagccgaaacctgccccttcaaacgacttattgacgcgacaatgaaacaaaggataccatacttcgtattcatcgtagtccaggtttcgagcggcggtgaccatccagttccagtcgactctattgatcgccttttcaagccaccgctgctgacaatggacccgcgcgtaatgcagcacgtagcgagggatgccgccccatcgatggagacaactcgatacgtcaatgaggggaagttgtggatacaccagggctcgacacgttaaaatctcctcatgtgaatgtatggtgcagttggtctcggcgaattgataccaatttgcgagctgcggtcgagctaaaaggatcgtcttggccgcgcaataaggcggtttagcaccatccacgatgtaatacgtcgtagttttacccagaatctccacgaaagcctgctctgatcctcggataaccatagtgcgagagaagagaatgcacttgtccctgtcttgataaaccaccgtcttaccggcgcgtgccaagtgaagcagaagaaacaacccgaaaaacattttaccgattccggcgtttccgaggatcaccacgtgcggtagattcttctttttgtcgtgcattgtctcccagtagctgcagataacagcgacgaatgtacacgcaagagccaagcaactcatcccccaaccagtgtaccccttccggtagtgtaaccacggcatcgggtcggatgtcggtctgatcttcctcgagtgctctccaaaatttagacagcgtcgtcggattcaacgtcatacgatccgtgagccacattgttgcgccgtccacatgaaggttcgccattttctcttggcaaattcgcgagtgagcaaattgtctgggtgggtggggagggggcttcaatcaatcaatcagttttctagactcggaaagcgatgttcgtaagcatctttctgtccctgtgagtcacaggctgtgactaaccatggggaggaaacctcggtgaccaggagcgaacaggtagtcgctgttatccaactcaactaaagaagaaggataacagcatccccattcaaataacacgaaaatttctccaaagtagataaagaaactcatttacctaaagaggtcgcagtcgatctggagcagagtcatctgcatgcgtgagtgcttgcaagtggcgtccactccttccatcacacatttttcttggtcttcagggtttcatccatgccaaagagcgacaggaacgaagaccaacccgatcggaagctcgatgaggccttgtgaaaatgcggctctggacaaataaaacgataatcgttggcggtaatatacgtcgtagcagctccaaacgataagacacgcttaccttcacttggacgtcctgcaacgttctggtcgagggcttcattctcctttatagccgccgacgtcgtcgcggccgtagctgtttgcgctgggcttccgggaatcaccaccagcacgtgaatttgctcctcctttggagcgcgctctccggtcatgtcgttctcttccaagacaccctgaatcgaccacgaagccctgagctgcgcttgcgaagtcatgtctcgaacgtcatcggtctccagtcgctcaacaaccgggtccgtatctttcagccactccctgttcttcttcgccaggactgcaacttgtcgactcgccttcgtacttcagcttttctgcgatggcgttcttcagtatgcccaccagtgtccactgcttaacggaaatgcagatgagtccgccgtctccgacgacaccgcacaccagcaccagttcttcttctttgtgcgccatggtttaggccgtccaacacaataaactgtgggggtcaggttcaatcagttcttcatcactcaggaatttcttcataacatttaaaaaaaattaggaattcactaactatctaggcaagagattgaggtatctcttggactccaacgacccccagtcatcgcttctctcggaattcgatggtgaactggaattcgtcagcccgctgctccacggagtgctctcggccagcctaatacccgcatactctccgcacgcgacccgacgcgcgttcgtccgccccgcttcatcgatacaatacgtgcagaaccacattttgttcttcacgaggcctcctccgagtccgatgaatcccagctcaatcttcactctacaactcgagcacagcgcgcgtttgcacagcgaacaggccccgatcccgttggcgaacaccccgggcgtctggccacagccgatgcactttgggtctcctcgaatgaatccaccgttgttcccagtatcgcgcagtctcaacaaccacgcgagcttcttgaggcgagcgcagtgcaccatcttcctggcggagatcaacgcggccgagcaatacttgaccaccaacgatcgagctactcggccccctgaattgaccgaagctttggagaagatatccacgacgctgtggttccgttggcgatacagtccacagatcgacatggtaccgcgaacgttaccccgaaccttcgtcgtctgagggaagtgcaccgagtggagcagctgatagccgaccaactcgccgtcgctgagcttggtgaaacccgtggcctccatgtacacgaagtcgcggttgttgatgatggagcggacgacaggcggctggtagccttcgacccacttgacggtgagcgactggaacgggttggtggcggttggccgatcgatcgtcgtcaatacggcaccattggccaactgatctccagcgtagaagtacttgagccgcattgactccaccgtgggggtcatcagtccatacatggcgttgtccagagagccctccatgaagccaacggtaagcaacgctggcacgtccgtcgactcggaagactgttgttggtcgatgaaacccaggcccgcgtcctccgcggggttcgagccttgcagctcagtgaagacccgcacattgtcacgctgtaggacctgcttccagcgcttgttgtcgagacgctcctggtcctcgtgcagatatcgctcgtagctcaccacctggtgctggacgagcacgtgcacgagctccttgaggtaggtggcgtccgcgtgcgagaggtggaggggcaggaacggactcgcagcattggccatgcttggcgatggaggagaggggaggtcaaagctggagtggagcgggccatgtggaatgcgggagctaccgcagacgagtaggttggtcgctctccatgcaggcgaacttggcgctttttcctgcgagattggcacggacggatcgacagcgagcatcaacaccgcagcagatcccgttcggagactccgagtcggaggattcccccgaactgtcgggaaccgagtcagtgcgaacagctccgggcgatgagaccttgtaacccgctgctcacctttgagagtcacgccagccccaatgcactgcggggggtatgcaaatcgctgcgggacattgcagctcgggcttttactgtacatgtacacttgaaaatcaaccgaagtttaccgccaagatggacatccattgcgaatacatgcaccttgcaaacttttcaggtggctacagtgtcgccggcttcaagagctgagcgcgctcggacgtagcaccacgacgttggggtcggatgccgtgagtccttccagatgagccgtcaatcggttcctgggatgcgactgcggacggtccgctccgaattcgtcgcaggcgagcgctcgggcgtccagcctccgggcctcgcgcacgcacgggccgcagaacttcatcttgtgcttggccacgcctcccgtccacgcaacgaagcgcagcgatttcttgaccctgcaggtcggacagatcggacgcgtacaaagtgtgcaggcgccgcttctgctgagcagcggcgacgagatgctgcgctcgccgcaggtaaagcagatgccgccgctgtctgcgcgaaagtctcgacaagagcttgaactgctgctgctgcatgtgctggtcgtggaggccgcgcgcgcgcgggttgatacgacccacgcgagcttcttggcgtgcgcgcagtccaccaggctctgcgccgacagcagcgcattcgcgccgtacttgacagcgatggccggcgcgacgtggccaccggggttggctgtcgtcttggtgaagacctcgacgaccccgtcactttgttgtcggtagaaggcgcagacggccatgtgcgcgcggacgttgccgttcatctccctggcgcctgggaacgtcaccgagtgcatgacgtggtagcccacgcgctcgcctccggccagcgtagtgacccctgtagcctccatgaagacaaagtctcggttcttgacgataggccggaagatgtacgggtggtcgccctcgaaccacttcaacgtgtgcgagcggaacgggtcgcttggtgtgggtctctccatcgtcgctagtactgcgcagctggcgaatttgtcccccacgtaggaagacttgagccgcatggagtctgcggttgggttcaagacgccgtacatgacatcgttcagggagccttggatcgtgccgaccagcagcagagtcggcatctcggccagggccgagcgcgcctctgtgtctcggaagagtctccgtcgggatacgcgctcgcctacgctgctgttctccctctgctgctggagttgctgctggcaatagacctgcagattgtcgcgctgcgagtgccgcttccattgtgtcgggttcaataggcgctggtcctggtgcacgaacttctcgtagctcagaatgtgttcgtgcactagcagccgcacgagctcttggagccacgcggtgtcggtgcaggacaactgcagaggcccgaatgggcttgaaggagtcgccatgggtgcgcgcgacggtggaagttgagaaatggagaccctccatccacgccgaaagattcactcccgctcctgtcgagacaaggatgtgggtctgtagatggtcgtctgcttcggagccttggatccattccgttccgccgtgtatcctgcgtgccgcgtggtttgacacgcatggtcaactctccatcaagacgcccgattttcgcacacgatcagtcacgctttcctccagcctggggcgaggctgcagccaaccgagcttcgtgcagccttcggatcgatggcgatgcggccacttgactacaatactgccatcccttcgcagcggaagcctctgaaaacagaacgagctgcagtacacgctgttcagatagtacagtagggacacacagggggtgaccacgccgcctcggtgtcgcggtggcggtcaaccgcttgactctgggtgatgtgtttgctccagcgagactggtgggccttttctcacagtaccaggtcggtggacgagtcggactccaccgacctggtcatttgccagtgacaaccaagtttagccaagcatcccacgagcagaggggcaagagagcactaaaaccccaatctacgagctcgtgcctgccgagcgagcacgatttatgagggttttcggctctcccatttaaatacgaacacaacgagcacccgcgagcccccgctcgttacggtcccccatattgggcaaaaagtaggaggaggcccccaccgccgcgtgccgcccgcagacgtcgccaagagaatcgggagcattttaacgtgtcgtgcaggagaagacacgaagaacggtggtgggtggtaacagagtgctcgttgttatggttcgaccacctgttgcagttcgtgaggcggttcaagcctatcaaccctctgcgggctacacgcttaaaccacctactgtcacagagaagtcattcatttttgagtggggtgtacgcgtagagtatatcgacaatgatgaagtgaaaactggctgggtatgtcttgccgacgaggcgtgtcgacaggcaggtgtgaagttggtgttgtcacgagcaagaacatctagagcaacagagcatttacgaaaggtgcatcgaatctcgtcgaagaaaactgcggctgcagttgaaggaaaacgaaagcgagaggaaacggttgaacggctgctctcgtcgaatttgtatcgaacaaaccctcaacgccttcatttgctgctggaaacccttcgcatcgtgaacaataacttgcctttctgtagcggcgagtacgaagaatcccgagtaatccggcaggtggtggtgagagaagagatgcagactacgataaatgcagagcgaattgcgaaggcaattgtcgagctctacagctcgaccaaagcggagttaattgacttcttagaacgtaatcgctccgattgcgcgaattttgtgatcatgacagacttttggacttgtcgtacagctcatgggaaatatttagggttgcggctttatctcgtggatgagttttggcaaatgcgatcggtgatgcttggaacgcgaaaatttagcccatcgtgtggagaccgcgacgttggaattcaaggtccattttcggcgtggctggaaaaaattctggaggatttcagacttcggaaagattttgtttttgctgccacgagcgacgctgggcctgatgtcaaaaacttgctggtcaacaaattgaaatacaggtgggaatggtgtgttgcgcacatggcccatgcagcgacaaaggaagcatgtggaatgagaaatgatgcaagtaagtcgctgaatccgggcatgactaagttgatttcacggattaagaagactatttaccaggttcgcaccgtggaaactactggcaatttatttcaagagctgtgtagaacacaaactgaaactggaacaacccaaccttttgattacaatccagcccgatttttgagtctgacgacagcaattagaaggattctggataaatggactgcgatagttgcctggtatgatgaaagggcacgaaaagcacttcgcgaaagccaagttccccctacttttccactacaagacgatcagctagatttggttcatctactctcattgctacggccgattgcgggtgttaagcgtatgtgtcaagctgaagaaccaaaccaagtaaatgtgctgcatgcactttatttgataaggtttaacacgcttgatctagacaagcctctcaaacactacatgtcgaccaaagaaaacccgaagtttattgccaaaaatgagttgacggacctggctcaatttactcgagaacgccttcgaaaggcgctcgattcacgatttttttcgagatattacaagacgagtgagactcaatcagctgcatttgtgtttgagatgcaatctcggcttcacccgacatacaaaaggcctgataaatccttaaaccgtgtggtaaagctatgctgtatcgacaatggtcacatggtgacgcggaaatctacacgtcatacactcagatgggttagtcaaaaccccttagccacacttgctgccacgaaatgacatagggcaccaagagagggttgtgagcactagcttcctcagtcttgtgagacctgtccaatcatattcatacgagcgagttctcagagttagctttaaacccagtgagtagggggatagctgcctaaacaagtgcagcgcgtaccgttcctttgatcctcacgctgcttcagtcgggcgcgcttccgtgtgtgcgctccaggccgcggattcgtgaatgagagctcgcgctgagcgcgaatctttggcgcgaagacagcccttgaagatcgccctcccccccagttgggggtggagtttgatcctatactaatgcaagtgttagttttatcatggttgcaacttcaggggcatcattaaacggggcaagtcgattaaactgaattgtttggtgagaccacttttcggtctcaccaaacaattaagtttaatccgaaagtttaatcatcgtttaatcctctcaaaccccagtgataaaaaagttttgtcacggttgtggaaggcacccagtggctctacaaatatcgcaacgaagggcgttaaaaccgcgagctttgaactggtgcggtatctccacgacaaccgctgtgaaccttgctcggctgatgctgtcattattgcgaaaaggtatgggaaggaccgtaccgcgaattcttcttgagcgtgaagactgccgcgcagcctatgagggggcggcgtcttgtgtgtctagcgaagaggagcccccattgccaataaagccaaacatgcaaactctggagtcaaggactatgctaggagagagctaacaagagaggagtcagcttgcattttcaagatcgcgttgttatcctgaactcgcacaagtacccggtcttccagtaggtttcacctcaacttgaagcctggccgccaggtaacgttagcgacagatgcacttgaaggccgactaccttcaagtgtatctgccgctaacactccagcctggccggctttgcaaagatggcattgtacatgtacgtatctgcgcgaatgctggtgcatttgcgagcagaaacatgtatccatctgagtttcggtgtaacaggatctcacggcggtgtctgtattttgtctatcttgctggctgcctggcggtgctttctctactcgaaggcatagttggggtgcactgttaaataccgctgctgcttgttggcgtcctcctcctcgggcgacagcttcttggtgcgcttcttggccttcttcttgtcctggtcgtcgccttccgccgactccatggtctcgtcctcgccgttctcctcttcatcgtcttccaggtctacgacagacaggattttgtcctgcagcagcttgtcgatcaccgagcagatcatccgcttctcgcgcgagagctgcgcctctgacgtgatgtcttgcgacgacaggtaccacgtcacgagctcgccctgcagcacgccgctcgcctcttcttcatagtactcgtcctcttccaccttctgctccccttctccgctcgctgctgtctgtgcgcggatggcatcgcgagcgagcttggcgctcatcgcctcctcctccttttctcggacgaaccggccgatagccttctggatcctagcgaagcgctcgaacgagagagaagacgacgtagtcgaaccctgcttgggcttggatggagtgccgtttgcagccgcaccggcggccgatgaaccaccattagcgctgccattagcagagtcattttggccgccacctccgcttccatcgtcattatcatcaccatcatcgtctccaccgtggccaccgccaccgcctcctccattgtgatcgtctccgttgtcttcactgtcagctccaacggggacaggcatctccagctcaacgttctgcgtatcgacgtggatgatcgacttgctcagtaaccggtaggcctcttgcacatgcgagaccagcaccgtgtccatgaggtcgagtcgggccagagcctcggacaaacggatcatggactccagctggcgcacggtgatacggtaggcgatgttggtctgtccattgctcacgacgtcgttctcgcggaggctccggtagcacgccaccatcatgcgcttcgcttcaggggtgatcacgggattgagcgtgcgcgcgaacttgatatagcgcttcaggtcttcttcgctgtacgcgccggtctccgtcgcctccacctgcagctcgctcggcatgtgaatgttgacgatgtgctctgcgattttctggtccgtgacttcgtcaccgtcgtcgaggataacgaagaacaggtcgaaacgcgacataatgggtgccgatatgttcacgttgtacttgagcgtcttggtcttgtcgtatcgaccgttatacgggttcgcagcggccaaaatacttgtacgcgcgttgagcgtggcctggataccagccttcgtgatggagatagtctgctgctccatagcctcgtgaatcgcgacctggtccatcgggtccatcttgtcgaactcgtctatacagcaaataccgttatctgccagcataagggcgccggcctccacacagtagtcgccactgtctgcatcgcgcgtcactgaagccgtaagacctgcagccgagctcacttttccagacgcgtaaatggcgcgcggcaagaatccaacgatatacttgagaaactgcgacttggcggttgacggatcgccgacaatgcagacgttgatatcaccacgcagcttgataccctctagagtcttcttgtgcacaccaccaaacagcatcagcagaattcccttccgaatctcgtcatggccgtagaccgacgggcaaatggacttggccatcttcaggtaccggtccgggtcctgctgcatctcacggatcgacgccagctcctcatcgctaaactcctgcagggcagcctcagctccatcttctccttcggcaccgtcttcgttaaactcgctgcgaatggagatgctgttgaagcgctgctccatcgtctgcacactacacgcaaggaagcacgtcttgtacgtgagctcgcgcacgccgagcgccttgagaccacgcacgccttcgccttccatgccttgggtgctgttctctcctccacgccgcggtcgctggccattgttgcgcgtagccaccgcgttctctcctccggcgcgagcgaacttggacacatcgggcaccacgatcagcgtacccgtaaagaccacgcggtctccagccttggcctgctcgacgttctcgtgcctcaagataacgtcaatagatctcggcatactgccggccgggatctcatcgctgttctcctgcaccttgacgcgctgccagtccacgaagaccgacttctcagtgttgagctcccacgagaaggtgttggggcagtacgggttctggcacttgaccggctcactatagcggaactgctgctccactccggtggtatccccgccgcagtccgtgcaggtaaaggctccgaacagcagctccggacgcacctcggacgtcctggtgactgtgcccgagaaggacaacagctctccgatactcctggtcctaaggtcccgaatactaccacaaaccagacacaaattttagtccccgtcctaaacatcctaaaatatcctagagatacgatcaaaacgaaaaacttactgcgacacgtgctggaagttgtagaagttgacgaagaactcgcgctgcgtcttgttggcgtcctcgttgaccgtgtaggccgcgtcctcgaggcggatgaactcgaagacgctgcgccgcaggtacggctcccagcggtagtactgggcctgcagggcctgcgccaggtccgggtcgaactcgagcacgtgcgagaagtccacgaacagcgacgacgtctccgtgttgcgcatgacctcggcctgctggctgtagttgatcttgggcggcgcgccctcgtccagggcctcgtcctgctgcccgtagccgcacaggaactgcaggaagcgcgtcttcacggcctccgccgtcgtgtccacgagcagctccacgggcgccgcgccagggttcagcgctgcagccgcgccgcccccgcgcccgcgcttggcgcccacgccggggccgccgctggtattgcctccggcctgcattgtttagtttaggatcagctaggaccaggcgttggcggtaaggcgattttccaccaatggtaggcgacttatattattgtatagtgtggagcacacgaagttgtaagtttgtggtcttttctattgttttttggcttttatttgaacgacaggatttgttcacgcagatattctccaggacgggtacgctgaaactttgctagaccacactatggcgaccgaacgaagacgtcaaatggtcgagccggacacgtgcttggtgctgtcttgagcctagtggaggttgtgcgcggggcttgctgattcgaacagtactgttgggtgacggccgagccgtgagggttgtaagcctcggcgttttcatctgcaagctcttgacacgctatcaggtggtcggcgccgacccaccacagcctgctcctgcagtgcgcggcgatgacacccctgggcttctataatgcacatgtacaggacccactgtcatacaatgcacaaacaaggacggcaatatgtgtccgcgctgatatcttttttcattttaacgtggcactgtcgctggcggaagattcgtgcacatgtaggttggccccacttccaagcaccattccacctcggtgggtgctcactatagttccgcccttcccattcacgcccgtggctcaaatatactcaccaccggcgccttaataattgtgatactttttgcgcctcgctcctgctcggtgccgctgtgacgctagagctcggcccttttacgcgagtagaggtgctctggtgcgctttgctcattgttgcaccgtctgtagtggtgtttaagcgcgcgatagccctggtcaagtcaaggctgtccagcatgaccagcgcactcatcgagtgcatgccgacctatcgacagtttgctcgccgctggcgccagcgcatacatccactgcaagcccttcgcgaaattaggccgccgagggagcagcccgcgacgaccagcgagcgagtgaaagacactgtgctttacccccctccaaatcggcacgagccccaaatattttccaacacaaaaacaatcggctacggtacgtgtacgccacgctggcgcgtccaacgcgcagagtaaaccagcggtttactagcatcgtgtcgaatccacagagcgttcaaacgctctgtgcgagcacgagcagcggatcttccccaaggggggaccctctctcctcgatagagtccgtcagctgctcaaaaaccggcagttcaaagtattgccaggctcattgcaggcggctacagtgtacatccatcgtcgtgtgaatgtacatacatgtatctgcggaattcacagtgaattcgggcagatccactggtctgccctcgaacgttcttgaagtggacttattcagcggcagctggagtcaatttcgagtcgcgtcgcaccagactatgactgtagaaatcagcgttcgtggtggtcgcaggggtgaggcttcggtgcgcgcagtggaagtcgtcactgcgctgacagagcggtcgccgctccccgttccctgtggatagactgctggtctctcgtccggtgtacgacagcgtaccgagacgcgcctcgactggaagggcacgacgactggctcacctcgctaacgcatgacaaagccggctttccaagccgcttcacaggggcaacaacgctgctgacgtcacgtgtcctgcagcgatcgcagacattggagcaatgtcgctcaggacactccaggtgacagtctggagcttgccccatcaatggcgtgagagctaacggccgctacgacacgcagcaatccgtctcacacgctcgttgcctacacttcggtcgcgcccgtgtgcactctctttgccccgtcatccgagttgagtgcgaagttacttcagtcacggggcgaaagtgcccaagtacagtaacagttaacgttacacagtgcagtgcactgtgcaccgcctcccaagcctgttcagcactctgcacccgcgcgcgggtctctcagtctctccgcgctgcttgcagctcggtgctcggacgggggctcgaggagtcggtgctcatttctgccgcgagagctgtccaccgacgccacaacgccgcaccttccacttgggctgtcccctttctgcttcctgcctcgtgtcgccggagcgtgctatgcacgactcgccatgcccgcgatgaggatcccagtcgtcttgctgcaacctaagcgggcgtcgtcgatccggaggcacgaagcgggacacgcagccccagccatttaaaaatctgccgagaagaggagagcagcacgccacgttctgccggagagcagcttcaaatcaatctggctatgggcggcaagaagcgcttcgtgatgaacccgttcccgtcgatggagctgtcgcctggtgacaagttgcagctccaaaagactgcgaacggcttcctggccgagtgtctgcactcgtacgagctgtacctcaaggacggcgggcgtcaggtggacgagcgtcgctggaagccgctcaagacgcgcgagaacctgcgactgtatctggagcgcgaggtgcgcaccacgacggacggcaaccactccatgatgaacgaggcgtccgaacaggctggaacgcccgtgtcgctttgcgtcggcacgatgcagggaacgctggacgacgtcgtcttcggcacggtgagcacgacgtcggaggacatgtgcttcaacgccacgtacgtggacgagctcaccggcgctgccgttctggccatcgttgtggagcccacggtcgaggagccgctgcagacgctggcgttgaagtggcaggagctcgatctgctgctgcactcgaacaagcgcgacttcgtgttcatggaggccacgggcttcacgcacctcgcgaacggcgagcgcgtcggataccgcctcatgtactccatcggcttcccgcagacgcccgagctgccgaaccgcgtgcgcgcgagcgtcaacgtgttcttcctcttccgccaggagcacgaccagtgcgtcgagctgtacgcgtcgggcgtcgtcgccaatggatcaagcgtcgagtcgttcctggtcaccgcctccgccatgaagttcttcacgtcgctccggttcgcgcactgcggagagatgaagaagctcacgtggctcatgcaccgccgctacgcgctggacaagcagcgcggcgcgcccatcggcgagggcgactgcgtcagctgcggcatccccatcagctccaagatcttcggcaagttcggccgctcgcgcgactcgtgcaagctctgccaccagctcgtgtgcggcacgtgccgcgtcaagaagcgcctgaacttcgtgacgctcgagatgacgttcgaggagcgcaagacggccttctgcccctcgtgcatcaaggaggccttcgaaatcaacacagcagacgccgcgcgcgcacaactcgcgggcaacaactcgcagtacgccttccactcgggcacagactactcgttcgcgtcctcgtccgactcggagcgcactacgtaggtaggctgtccccgaaagaataatgtcataacaacaaattctacccccccccccccccccccgcctgtatcataacgatgcatcgataaaggagaccatcggtcaaacagatcgagttgaaggcaacttcaacgcacatgcatttcagcgaatcgtgtcatcgctagtcgaaattctgtgattggccaaaaacacgaccgtttccttatcctggtccggtcgtcacgcgcgacactgagccgttacctacgcgctgcgcccacgttgtgtcttccgactcccacagcgcagcgcagcgttcccgtgcggccaacaacagcaccagtccccaagcaaccacccaagtcaccaagtcattgcagtgcagctccatcgtccctggtataaatagctgggtctgaaggggcgcgtgtcaaccgtcagtcaaaccacgggagttcacttgacaggatacgtatcctgtcattgccgcaatcctgtatcaccatgccagcgtggggtccaagtccgtttggcccgctgcagctctcggtggaggacgcgacgagtctgggcgagatcgcgcgcgtgttcgtacaggataacatgcgcagctacgaaaagtatctgtacgaggaccagcgccggctggacgaacgtcgctggaagctcacaaagcagcgggacggtgtgcacgtgtacgtggagcagccgctcaaggagcgacgcaaggtgggcggagtcacgcaggacgagctggagcgggagtaccgccaccagttgcagcgcacgacggcgggcgagaaggtgacggcggcggccgccgcgtcactggcagatctgccactgctgctggctgttgggaccattgcaggtactttggacgacgccatgtacggggcggtgaactcgacgctggaggctatgcgggtcaagtcgtcgtacgtgggggacaacatggcggacggagccgtgctcgcctccattgtggagcccacagccagcgacccgttccactcgctcacggtcaagtggatggagaacgagcagctccatgtgctcaaacccgtggtcaagaaccgagactttgtgtacctggaggtgacaggtttagcagaactcgatacaggcgaacgcgtgggatatcacttgctgcactcggtggatttccctcaagctccagagctggatggacgtgtacgcgcgaatttatccgtgggcgccctgtatcgtcaagaacgcgaggggctcgtggatgtctacgtccgagctatcctgaacccgagtggaagcattatccgctcgctggtggtgaggtcagtagcggacgctatcatttccgtgaccgagatcgcagaatgcgcccagaagaagaagctggcgtggctagcgaagacctcccgagatgctcgccgccaacgagtcatgcagaataccgtagcagcagtagtggaagccaacacgattaactcgcctggtgggcgatctaccgtgaccagcacaacgtccagcaccgccacaacgcgtccgagtgttccgctctcagtgatccctgagattccgggtcctgcttccgcttcaacggctagtaccatggagaaatgcacgtcgtgtcagaagcgttcgacccacagaactccctctggtagttttgtgaatacgtacgataagcgactggaccgggaccgctgcaagttgtgctacaggtttgtctgctcgtcgtgccgagtgaagcacaaactcaccttcatcaaaccccaaggcgagctgctgcgacgtgatcttcgcttctgtggtcgctgcgtggatcgtgccagagcggccgacacgctcacgattgcaagtgaggagctggcgtccggagaacagcaatttgccgagttctaccagagcttgagccccgtatcgggcgagtcgagtggacgaggcggcagcacaaatggcatgtgaagaagattggcgaagtaaggtaatatctattgttcctcctcacttggatgtatgcccttataatctatgctttgataagaattccgtgcagtccaccttagctctcagctggggcagatagcttcaggactcttgtggcacagcgctgggttgatagctaccgtcggaggcaggctggtgaaggtgaaggggttgtcgccgacagtgctggagatcacgaggcggtaggagccgtacgagctgcgggtgcggcacgtgtagagttctggaggatagtcggccttggtcttgccggcaagcgcgtcgtccccactagcaccagtcggcgcgatgacgagagtgtacgatcctttcttgaggaaagtttccttgaacgggtcacggtagctcacggagccgtcgtcgttcccgttgtccacctggctgtcgtcgacggtgaacactgggtccgtgtctccgtcagcgaagaggtaaatcatcgagtcgaggtaggacgcgcggcagtccccgttcaagtcgtagaaggtgtcgttgtccgcaatctcaaccgagagcacgtcgaacgaggcgtccgtgtcactgctcagtgtgaacttgacggagtcgatgctgacgtagctcgaagcgaggatgatagcgccatcaattgtcaggcgtgacgttagcggcagcgcagcttcaggggccggcggggtgtacgacgggaatctctcagcgttggctgccgggtttgatccatcgtcaacgccgtcaaactccgccacattgataccgttcgccctcaagtcgtcgatgatgctcttcgccggaattcccgtgttcgcgcacatttcaccgcagtggtgtagcgcgatgacgccgtgatccgcgaaggaaatgactggcgatccagaagagccgctctgggtgtcaccactgtacgagtagcccacggtgccgcacgagctagcactgagactgagcaatgcgacgttgttggtgtagtcgtcgaccatcgcgatccgcttgccctcatacagcgggtgctgaggaatatacacctgctcacccaccactccgtcgcgcgtcttcaagcgcagatagccgtacttttgagccgtttgaggtccatcggacggcagcttcagcagcgcgtagtcgagctcttcatccgcgtggacgaggttaacactcaccgagacggtatcaccagggcaagccccccatgacgcacacgacatactgtcgctgcagacgctggcttcggccatgaactccaccgttgtgccactcgcctcgtcgtccgtggacacgcagtggtagttggtcatgatgtgtccctggttgcctagcagccaagccgtgcagcctgctgaagcccccgggcccttcggaatgagcagtcgagccacggaccgagcagccaagaacgcagtgcgcgtggtgttgtcgtcgtagtagcaaatggcctccttggtgttgtcaacggcgcaaatggactcgtcggtggccacgatggggttgtcgttgtccatgagcacgtagtagtacgagtcgaccacgaagccaaagcacgtcacgtcgctgtcagtcacgctgaaggtgtcggcgatgaggtcagcatcaacctcagtggtgttggggctgccctggttgcggtagaattcaagacggaactccttcgagagcagaggctgagcgaggacgttgtcgtacatctgaccgcccgggtagttcgcggacaggttaagcgtgcgatccggcgagtcgaagccttccactgcgcgcagcaccacagagacaccacgcggcatccagagtttgctgaagtgcagcgccacgtacgcatacccggtacctttggtcagcgtgaaagaccggaatggagtggggcttccaggcgtggcgctgtcaaaggctgtctggaattccgggcagcccatgccgatgttcacagtgcgcagtctggactccgtcgacgagtttgaagtcgctgaaatcgtccccgagtcgtcaatgtacactggtgccgttgtcgtggtggtggagcctggcgtgtcgtccgtgttcatcgtgttgaagatcgcgctacggaggttgttgttcttgtcggttggattggcggcgtacgtcgccatcagcagcaaggtgatcaggcctgtcagccccatcatgcgatagcgtcgctcgttcccgctgcttggaggcgtgtcgctgtcatccagtcgatggtgggtcgtcgcgaccataacatcgtgcatttctcagtgcgtggctggaggtggctgcttaaccgaggaacgggaatttgacaagtgggttgaatgcagaattgggggcgttagttgacgacagcatcaacatgccgccagtgttgtcatgacccggccaagattgaagcttggctagatcgagacctgcctatcaataggaaggatatcctgaggacgacgcgtgccgcttaactatttgtagatcaatgtgcctcgacatccgatcctggatggctgggcaagtctccgatccgttgcccggtgagccaagaccgcctcttatcctcaaccacgtcagagctatatatataagcgttggtccagtcaatgaatgacatggcatgccgcgtgaaaagctaaaagctgttaaaagcaggtcgcaggatccgataggtatcaatacatttcgttaaaatagttgagctaagcgcgatcgaatgcagggcgaaccgtgtccggaatctggatcacctctgacagtagtgaagctctgtgctgggcctgcaccagcgatctacattggttcgcatagtgcggcccttgcctcgccgcacctgttggaggacacttgaagttgttcccttcctgtggaggacggtgtccgcaattgtgcctaaaaggtcactcatctgatccaatttgatgcgcgtcaccacatacccctattcgtttaacaaattgagccaatcgtgtgcgcgcagacgcgtgcgagtccgattacgcgttgcttacgcgaatataacccgtaagcaacgcgtaccatacgcgtaagatacggaatgtatgtgcggccgaccgccaacggcccacaagaagcctctcgaagcatcacttcctgagcatgcaggccctgcgtaccttgacctcttccgcgcgcgccctgcgcccgcgcaccgccgccaaggcggccgcctccacgcgcgccttcgccacggacaagcgctacacgcccgtgaacgaggtgcccgccagcgtcttggagaacgtcaagtcggacacgatcttctcgccgggcttcgctgtgcgcggcgagcacgcgcccatcaagggcgccaagcccgcgtacctggacgtgcaggccacgtcgcccatggacccgcgcgtgctggacgccatgctgccgtacatgacgtacgcgtacggcaacccgcactcgacgacgcacgagttcggctgggacgccgacaaggccgtggagcacgcgcgcggcagcgtggccagcctcatcggcgccaactcgaaggagatcatcttcacgtcgggcgccacggagtgcaacaacgccatcctcaagggcatcgcccacttcaccaaggccaagaagaagcacatcatcaccacgcagatcgagcacaagtgcgtgctggactcgtgccgcgtgctcgagaccgagggcttcgaggtcacgtacctgcccgtgggcgagaacggccttgtggacctggagcagctgaaggccgcgatccgccccgatacggcgctggtgtccatcatcgccgtgcacaacgagatcggcgtgctgcagccgctcaaggagatcggccagatctgccgcgagcgcaaggtcttcttccacacggacgccgcgcagatgctcggcaagctgcccattgatgtcaacgagatgaacatcgacgtcatgtccatgtcgggccacaa
